(19) United States
(12) Patent Application Publication
(10) Pub. No.: US 2013/0244897 A1
(43) Pub. Date: Sep. 19, 2013

(54) Marker Sequences for Multiple Sclerosis and Use Thereof

(71) Applicants: Angelika Lueking, Bochum (DE); Axel Kowald, Bochum (DE); Heike Göhler, Bochum (DE)

(72) Inventors: Angelika Lueking, Bochum (DE); Axel Kowald, Bochum (DE); Heike Göhler, Bochum (DE)

(73) Assignee: Protagen AG, Dortmund (DE)

(21) Appl. No.: 13/877,248

(22) PCT Filed: Oct. 4, 2011
(86) PCT No.: PCT/EP2011/067285

§ 371 Date: May 31, 2013

(30) Foreign Application Priority Data
Oct. 1, 2010 (EP) 10186327.2

(51) Int. Cl. C12Q 1/68; G01N 33/68

(52) U.S. Cl. CPC C12Q 1/6883; G01N 33/6854
USPC 506/9; 436/501; 506/16; 506/18; 210/646; 604/6.01

(57) ABSTRACT

The invention relates to novel marker sequences for multiple sclerosis and to the use thereof in diagnosis as well as to a method for screening potential active ingredients for multiple sclerosis diseases the marker sequences. The invention further relates to a diagnostic device containing such marker sequences for multiple sclerosis, especially to a protein biochip and the use thereof.

[0001] The present invention relates to novel marker sequences for multiple sclerosis and to the use thereof in diagnosis, together with a method for screening potential active ingredients for multiple sclerosis diseases by way of these marker sequences. The invention further relates to a diagnostic device comprising such marker sequences for multiple sclerosis, in particular a protein biochip, and to the use thereof.

[0002] Protein biochips are gaining increasing industrial importance for analytical and diagnostic purposes as well as in pharmaceutical development. Protein biochips have also become established as screening tools.

[0003] To this end, the fast and highly parallel detection of a plurality of specifically binding analysis molecules during a single experiment is made possible. Producing protein biochips requires the availability of the necessary proteins. For this purpose, in particular protein expression libraries have become established. High throughput cloning of defined open reading frames is one option (Heyman, J. A., Cornthwaite, J., Foncerrada, L., Gilmore, J. R., Gontang, E., Hartman, K. J., Hernandez, C. L., Hood, R., Hull, H. M., Lee, W. Y., Marcil, R., Marsh, E. J., Mudd, K. M., Patino, M. J., Purcell, T. J., Rowland, J. J., Sindici, M. L. and Hoeffler, J. P. (1999) Genome-scale cloning and expression of individual open reading frames using topoisomerase I-mediated ligation. Genome Res, 9, 383-392; Kersten, B., Feilner, T., Kramer, A., Wehrmeyer, S., Possling, A., Witt, I., Zanor, M. I., Stracke, R., Lueking, A., Kreutzberger, J., Lehrach, H. and Cahill, D. J. (2003) Generation of Arabidopsis protein chip for antibody and serum screening. Plant Molecular Biology, 52, 999-1010; Reboul, J., Vaglio, P., Rual, J. F., Lamesch, P., Martinez, M., Armstrong, C. M., Li, S., Jacotot, L., Bertin, N., Janky, R., Moore, T., Hudson, J. R., Jr., Hartley, J. L., Brasch, M. A., Vandenhaute, J., Boulton, S., Endress, G. A., Jenna, S., Chevet, E., Papasotiropoulos, V., Tolias, P. P., Ptacek, J., Snyder, M., Huang, R., Chance, M. R., Lee, H., Doucette-Stamm, L., Hill, D. E. and Vidal, M. (2003) C. elegans ORFeome version 1.1: experimental verification of the genome annotation and resource for proteome-scale protein expression. Nat Genet, 34, 35-41.; Walhout, A. J., Temple, G. F., Brasch, M. A., Hartley, J. L., Lorson, M. A., van den Heuvel, S. and Vidal, M. (2000) GATEWAY recombinational cloning: application to the cloning of large numbers of open reading frames or ORFeomes. Methods Enzymol, 328, 575-592). However, such an approach is highly dependent on the progress of genome sequencing projects and the annotation of these gene sequences. Moreover, the determination of the expressed sequence can be ambiguous due to differential splicing processes. This problem can be circumvented by the use of cDNA expression libraries (Büssow, K., Cahill, D., Nietfeld, W., Bancroft, D., Scherzinger, E., Lehrach, H. and Walter, G. (1998) A method for global protein expression and antibody screening on high-density filters of an arrayed cDNA library. Nucleic Acids Research, 26, 5007-5008; Büssow, Nordhoff, E., Lübert, C., Lehrach, H. and Walter, G. (2000) A human cDNA library for high-throughput protein expression screening. Genomics, 65, 1-8; Holz, C., Lueking, A., Bovekamp, L., Gutjahr, C., Bolotina, N., Lehrach, H. and Cahill, D. J. (2001) A human cDNA expression library in yeast enriched for open reading frames. Genome Res, 11, 1730-1735; Lueking, A., Holz, C., Gotthold, C., Lehrach, H. and Cahill, D. (2000) A system for dual protein expression in Pichia pastoris and Escherichia coli, Protein Expr. Purif., 20, 372-378). To this end, the cDNA of a particular tissue is cloned into a bacterial or eukaryotic expression vector, such as yeast. The vectors used for expression are generally characterized in that these carry inducible promoters, by way of which the time of protein expression can be controlled. In addition, expression vectors comprise sequences for so-called affinity epitopes or affinity proteins, which permit the specific detection of recombinant fusion proteins by way of an antibody that is directed against the affinity epitope and additionally enable specific purification by way of affinity chromatography (IMAC).

[0004] For example, the gene products of a cDNA expression library from human fetal brain tissue in the bacterial expression system Escherichia coli were arranged in a high-density format on a membrane and able to be successfully screened with various antibodies. It was shown that the proportion of full-length proteins was at least 66%. It was further possible to express the recombinant proteins from expression libraries in high throughput and purify them (Braun P., Hu, Y., Shen, B., Halleck, A., Koundinya, M., Harlow, E. and LaBaer, J. (2002) Proteome-scale purification of human proteins from bacteria. Proc Natl Acad Sci USA, 99, 2654-2659; Buessow (2000) supra; Lueking, A., Horn, M., Eickhoff, H., Buessow, K., Lehrach, H. and Walter, G. (1999) Protein microarrays for gene expression and antibody screening. Analytical Biochemistry, 270, 103-111). Such cDNA expression library-based protein biochips are the subject matter in particular of WO 99/57311 and WO 99/57312.

[0005] In addition to antigen-presenting protein biochips, antibody-presenting arrangements are described (Lal et al (2002) Antibody arrays: An embryonic but rapidly growing technology, DDT, 7, 143-149; Kusnezow et al. (2003), Antibody microarrays: An evaluation of production parameters, Proteomics, 3, 254-264).

[0006] However, there is a high need to make indication-specific diagnostic devices, such as a protein biochip, available.

[0007] The object of the present invention is to provide improved marker sequences and the diagnostic use thereof for treating multiple sclerosis.

[0008] The provision of specific marker sequences allows a reliable diagnosis and stratification of patients with multiple sclerosis, in particular by way of a protein biochip.

[0009] The invention therefore relates to the use of marker sequences for diagnosing multiple sclerosis, wherein at least one marker sequence of a cDNA selected from the group SEQ 1-308, or a respective protein coding therefor, or a respective partial sequence or fragment thereof (hereinafter: marker sequences according to the invention) is determined on or from a patient to be examined.

[0010] It was possible to identify the marker sequences according to the invention by way of differential screening of samples, specifically from healthy participants, with samples from patients with multiple sclerosis.

[0011] For the first time, these marker sequences according to the invention were identified by way of protein chips (see examples).

[0012] In the prior art, marker sequences for multiple sclerosis were already identified using a protein biochip, see WO2009030225. However, in the present case according to the invention, improved bioinformational evaluation is aspired, and the samples are particularly preferably taken from the cerebrospinal fluid (CSF). Moreover, specifically selected samples are used, which accommodate the high sensitivity of a protein biochip.

[0013] The term “multiple sclerosis ((MS), also encephalomyelitis disseminata)” relates to an autoimmune inflammatory/demyelinating and degenerative disease of the central nervous system (for example, definition according to Pschyrembel, de Gruyter, 261st edition (2007), Berlin).

[0014] It is essential for the invention that the samples are not taken from conventional blood banks, but were carefully selected from MS patients who are HIV and HCV negative, for example, and were tested in particular for infectious diseases. The complex sample selection procedure allows, for example, sufficient advantageous differentiation from diseases such as neuroborreliosis with symptoms similar to MS. Moreover, false positive results are excluded, for one because of the strict bioinformational evaluation (see examples), and secondly by comparing the results on a protein chip according to the invention to, for example, sera of neuroborreliosis patients without multiple sclerosis.

[0015] Contrary to WO2009030225, the protein biochips are additionally produced by normalizing at least 1,000, preferably 2,000 different, or more, autoantigens of humans, which are not indication-specific of multiple sclerosis. For example, such autoantigens can be obtained from other bodily fluids of patients with other illnesses (such as pancreatic cancer, rheumatoid arthritis, prostate and the like).

[0016] The invention therefore also relates to such indication-specific protein biochips according to the invention for diagnosing multiple sclerosis, wherein in a further step, the proteins or marker sequences represented on the protein biochip are normalized with autoantibodies from non-multiple sclerosis patients and false positive proteins can be eliminated in this way. Remaining non-false positive proteins can be newly arranged on a protein biochip, which is referred to as rearraying. This likewise allows autoantibodies with a positive response to E. coli to be excluded. This is a further qualitative improvement, for example because autoantibodies that are directed to E. coli enterobacteria in humans can be excluded. As a result, new marker sequences can advantageously be identified with an improved signal-to-noise ratio.

[0017] In a further preferred embodiment, at least 2 to 5 or 10, preferably 30 to 50 marker sequences, or 50 to 100 or more marker sequences are thus determined on or from a patient to be examined.

[0018] In a further embodiment of the invention, the marker sequences according to the invention can also be combined, supplemented or expanded with known biomarkers for this indication.

[0019] In a preferred embodiment, the marker sequences are determined outside the human body and the determination is carried out in an ex vivo/in vitro diagnosis.

[0020] In a further embodiment of the invention, the invention relates to the use of marker sequences as diagnostic products, wherein at least one marker sequence of a cDNA is selected from the group SEQ 1-308, or a respective protein coding therefor, or a respective partial sequence or fragment thereof.

[0021] The invention further relates to a method for diagnosing multiple sclerosis, wherein a.) at least one marker sequence of a cDNA selected from the group SEQ 1-308, or a protein coding therefor, or a respective partial sequence or fragment thereof, is applied to a solid support, and b.) brought in contact with body fluid or tissue extract and c,) the detection of an interaction of the body fluid or tissue extract with the marker sequences from a.) is carried out.

[0022] The invention therefore also relates to diagnostic products for diagnosing multiple sclerosis, each selected from the group SEQ 1-308, or a respective protein coding therefor, or a respective partial sequence or fragment thereof.

[0023] Such an interaction can be detected by a probe, in particular by an antibody, for example.

[0024] The invention therefore also relates to the problem of providing a diagnostic device or an array, in particular a protein biochip, which allows a diagnosis of or examination for multiple sclerosis.

[0025] The invention further relates to a method for the stratification, in particular for the risk stratification, and/or treatment management of a patient with multiple sclerosis, wherein at least one marker sequence of a cDNA selected from the group SEQ 1-308, or a respective protein coding therefor, is determined on a patient to be examined.

[0026] The invention further encompasses the stratification of patients with multiple sclerosis into new or established sub-groups of multiple sclerosis as well as the expedient selection of patient groups for the clinical development of new therapeutic agents. The term treatment management also includes dividing the patients into responders and non-responders with respect to a treatment or the treatment course thereof.

[0027] The term “diagnosis” within the meaning of the present invention denotes the positive identification of multiple sclerosis by way of the marker sequences according to the invention and the association of patients with the multiple sclerosis disease. The term ‘diagnosis’ comprises medical diagnostics and examinations in this regard, in particular in vitro diagnostics and laboratory diagnostics, as well as proteomics and nucleic acid blotting. Additional examinations may be required for validation and to exclude other illnesses. The term ‘diagnosis’ therefore likewise encompasses the differential diagnosis of multiple sclerosis by way of the marker sequences according to the invention and the prognosis of multiple sclerosis.

[0028] “Stratifying (also: stratification) or treatment management” within the meaning of the present invention shall mean that the method according to the invention allows decisions regarding the treatment and therapy of the patient, be it hospitalization of the patent, use, effect and/or dosage of one or more pharmaceuticals, a therapeutic measure or monitoring the progression of an illness or treatment, or etiology or classification of a disease, for example into a new or existing sub-type, or the differentiation of illnesses and the patients thereof.

[0029] In a further embodiment of the invention, the term “stratification” comprises in particular risk stratification with the prognosis of an outcome of a disadvantageous health event.

[0030] Within the scope of the present invention, the term “patient” is considered to mean any participant—human or mammal—with the proviso that the participant is examined for multiple sclerosis.

[0031] The term “marker sequences” within the meaning of the present invention shall mean that the cDNA, or the respective polypeptide or protein obtainable therefrom, is significant for multiple sclerosis. For example, the cDNA, or the respective polypeptide or protein obtainable therefrom, can exhibit an interaction with substances from the body fluid or tissue extract of a patient with multiple sclerosis (for example antigen (epitope)/antibody (paratope) interaction). Within the meaning of the invention, “wherein at least one marker sequence of a cDNA selected from the group SEQ 1-308, or a respective protein coding therefor, or a respective partial sequence or fragment thereof, is determined on a patient to be examined” shall mean that an interaction between the body fluid or tissue extract of a patient and the marker sequences according to the invention is detected. Such an interaction includes, for example, a bond, in particular a binding substance on at least one marker sequence according to the invention or, in the case of cDNA, hybridization with a suitable substance under select conditions, in particular stringent conditions (for example as customarily defined in J. Sambrook, E. F. Fritsch, T. Maniatis (1989), Molecular cloning: A laboratory manual, 2nd Edition, Cold Spring Habor Laboratory Press, Cold Spring Habor, USA or Ausubel, “Current Protocols in Molecular Biology”, Green Publishing Associates and Wiley Interscience, N.Y. (1989)). One example of stringent hybridization conditions is: hybridization in 4×SSC at 65° C. (alternatively in 50% formamide and 4×SSC at 42° C.), followed by several washing steps in 0.1×SSC at 65° C. for a total of approximately one hour. One example of less stringent hybridization conditions is hybridization in 4 s SCC at 37° C., followed by several washing steps in 1×SCC at room temperature.

[0032] According to the invention, such substances are constituents of a body fluid, in particular blood, whole blood, blood plasma, serum, patient serum, urine, cerebrospinal fluid, synovial fluid or a tissue extract of the patient.

[0033] In a further embodiment of the invention, however, the marker sequences according to the invention can be present in a significantly higher or lower expression rate or concentration, indicating multiple sclerosis. To this end, the relative sick/healthy expression rates of the marker sequences for multiple sclerosis according to the invention are determined by way of proteomics or nucleic acid blotting.

[0034] In a further embodiment of the invention, the marker sequences comprise a detection signal that is addressed to the substance to be bound (for example antibody, nucleic acid). According to the invention, the detection signal is preferably an epitope and/or paratope and/or haptene for a protein, and it is a hybridization region or binding region for a cDNA.

[0035] The marker sequences according to the invention are listed in Table A and can be unambiguously identified by the respective cited database entry (also via the Internet: http://www.ncbi.nlm.nih.gov/) (see in Table A: Accession No. there), see also the associated sequence protocol.

[0036] The invention thus likewise relates to full-length sequences of the markers according to the invention, more particularly as defined in Table 1 by way of the known database entry, hereafter referred to as SEQ 1a-308a (cDNA) and SEQ 1b-308b (protein).

[0037] The invention therefore also comprises embodiments of SEQ 1a-308a that are analogous to the marker sequences SEQ 1-308, as described in the claims for example, because the SEQ 1-308 according to the invention again represent partial sequences, at least with high homology. However, the specific marker sequences SEQ 1-308 are preferred according to the invention.

[0038] According to the invention, the marker sequences also comprise modifications of the cDNA sequence, and of the corresponding amino acid sequence, such as chemical modification, for example citrullination, acetylation, phosphorylation, glycosylation or polyA tail and other relevant modifications known to a person skilled in the art.

[0039] Another embodiment of the invention also encompasses partial sequences or fragments of the marker sequences according to the invention. These are in particular partial sequences that are 95%, 90%, notably 80% or 70% identical to the marker sequences according to the invention.

[0040] Partial sequences also include sequences that comprise 50 to 100 nucleotides, 70 to 120 nucleotides of a sequence of SEQ 1-308, or peptides obtainable therefrom.

[0041] “Partial sequences or fragments” of the marker sequences according to the invention are functionally defined and comprise sequences that have the same diagnostic function according to the invention.

[0042] In a further embodiment, the respective marker sequence may be represented in differing quantities in one or more regions on a solid support. This allows the sensitivity to be varied. The regions can each comprise a collectivity of marker sequences, which is to say a sufficient number of different marker sequences, in particular 2 to 5, or 10 or more, and optionally additional nucleic acids and/or proteins, in particular biomarkers. However, at least 96 to 25,000 (numerical) or more different or identical marker sequences and additional nucleic acids and/or proteins, in particular biomarkers, are preferred. Further preferred are more than 2,500, particularly preferred are 10,000 or more different or identical marker sequences and optionally additional nucleic acids and/or proteins, in particular biomarkers.

[0043] Another object of the invention is an arrangement of marker sequences comprising at least one marker sequence of a cDNA selected from the group SEQ 1-308, or a respective protein coding therefor. The arrangement preferably comprises at least 2 to 5 or 10, preferably 30 to 50 marker sequences, or 50 to 100 or more marker sequences.

[0044] Within the scope of the present invention, “arrangement” shall be synonymous with “array”, and provided that this “array” is used to identify substances on marker sequences, this shall be understood to mean an “assay” or a diagnostic device. In a preferred embodiment, the arrangement is designed so that the marker sequences represented on the arrangement are present in the form of a grid on a solid support. Moreover, arrangements that allow a high-density arrangement of protein binders and where the marker sequences are spotted are preferred. Such high-density spotted arrangements are disclosed in WO 99/57311 and WO 99/57312, for example, and can advantageously be employed in a robot-assisted automated high-throughput method.

[0045] However, within the scope of the present invention the term “assay” or diagnostic device also comprises embodiments of a device, such as ELISA, bead-based assay, line assay, western blot, immunochromatographic methods (for example so-called lateral flow immunoassays) or similar immunological single or multiplex detection methods. A protein biochip within the meaning of the present invention is a systematic arrangement of proteins on a solid support.

[0046] The marker sequences of the arrangement are fixed on a solid support, however preferably they are spotted or immobilized, even printed on, which is to say they are applied reproducibly. One or more marker sequences can be present multiple times in the collectivity of all marker sequences and be present in differing quantities relative to a spot. Furthermore, the marker sequences can be standardized on the solid support (for example by way of human globulin serial dilution series as internal calibrators for data normalization and quantitative evaluation).

[0047] As a result, the invention also relates to an assay or a protein biochip comprising an arrangement containing marker sequences according to the invention.

[0048] In a further embodiment, the marker sequences are present in the form of clones. For example, such clones can be obtained by way of a cDNA expression library according to the invention (Büssow et al. 1998 (supra)). In a preferred embodiment, such expression libraries containing clones are obtained by way of expression vectors from an expressing cDNA library comprising the cDNA marker sequences. These expression vectors preferably comprise inducible promoters. The expression can, for example, be induced by way of an inducer such as IPTG. Suitable expression vectors are described in Terpe et al. (Terpe T Appl Microbiol Biotechnol. 2003 January; 60(5):523-33).

[0049] Expression libraries are known to a person skilled in the art and can be produced according to standard reference books such as Sambrook et al, “Molecular Cloning, A laboratory handbook, 2nd edition (1989), CSH press, Cold Spring Harbor, N.Y. Also preferred are expression libraries that are tissue-specific (for example human tissue, in particular human organs). According to the invention, expression libraries that can be obtained by way of exon trapping are also covered. The term ‘expression bank’ can be employed synonymously for the term expression library.

[0050] Also preferred are protein biochips or corresponding expression libraries that have no redundancy (so-called: Uniclone® library) and that can be produced according to the teachings of WO 99/57311 and WO 99/57312, for example. These preferred Uniclone libraries have a high proportion of non-defective fully expressed proteins of a cDNA expression library.

[0051] Within the scope of the present invention, the clones can also be, but are not limited to, transformed bacteria, recombinant phages or transformed cells from mammals, insects, fungi, yeast or plants.

[0052] The clones are fixed, spotted or immobilized on a solid support.

[0053] The invention thus relates to an arrangement, wherein the marker sequences are present in the form of clones.

[0054] The marker sequences can also be present in the form of a fusion protein comprising at least one affinity epitope or “tag”, for example. The tag may be one such as c-myc, his tag, arg tag, FLAG, alkaline phosphatase, V5 tag, T7 tag or strep tag, HAT tag, NusA, S tag, SBP tag, thioredoxin, DsbA, including a fusion protein, preferably a cellulose-binding domain, green fluorescent protein, maltose-binding protein, calmodulin-binding protein, glutathione S-transferase or lacZ.

[0055] In all embodiments, the term “solid support” encompasses designs such as a filter, a membrane, a magnetic or fluorophore-labeled bead, a silicon wafer, glass, metal, plastic material, a chip, a mass spectrometry target or a matrix. However, a filter is preferred according to the invention.

[0056] Moreover, PVDF, nitrocellulose or nylon are preferred filters (for example Immobilon P Millipore, Protran Whatman, Hybond N+ Amersham).

[0057] In a further preferred embodiment of the arrangement according to the invention, this arrangement corresponds to a grid having the size of a microtiter plate (8-12 wells, 96 wells, 384 wells or more), a silicon wafer, a chip, a mass spectrometry target or a matrix.

[0058] In a further embodiment, the invention relates to an assay or protein biochip for identifying and characterizing a substance for multiple sclerosis, characterized in that an arrangement or assay according to the invention a.) is brought in contact with at least one substance to be analyzed and b.) successful binding is detected.

[0059] The invention further relates to a method for identifying and characterizing a substance for multiple sclerosis, characterized in that an arrangement or assay according to the invention a.) is brought in contact with at least one substance to be analyzed and b.) successful binding is detected.

[0060] The substance to be analyzed can be any arbitrary native or non-native biomolecule, a synthetic chemical molecule, a mixture, or a substance library.

[0061] After the substance to be analyzed has come in contact with a marker sequence, the successful binding process is evaluated, which can take place, for example, using commercially available image analysis software (GenePix Pro (Axon Laboratores), Aida (Raytest), ScanArray (Packard Bioscience)).

[0062] The protein-protein interactions according to the invention (for example protein on marker sequence, such as antigen/antibody) or corresponding “means for detecting successful binding” can be visualized, for example, in the customary manner by way of fluorescent labeling, biotinylation, radioisotope labeling or colloidal gold or latex particle labeling. Bound antibodies are detected with the aid of secondary antibodies labeled with commercially available reporter molecules (for example Cy, Alexa, Dyomics, FITC or similar fluorescent dyes, colloidal gold or latex particles), or with reporter enzymes, such as alkaline phosphatase, horseradish peroxidase, or the like, and the corresponding colorimetric, fluorescent or chemiluminescent substrates. Readout is carried out, for example, by way of a microarray laser scanner, a CCD camera or visually.

[0063] In a further embodiment, the invention relates to a pharmaceutical/active ingredient or prodrug developed for multiple sclerosis and obtainable through the use of the assay or protein biochip according to the invention.

[0064] The invention therefore likewise relates to the use of an arrangement according to the invention or an assay for screening active ingredients for multiple sclerosis.

[0065] In a further embodiment, the invention therefore likewise relates to a target for the treatment and therapy of multiple sclerosis, selected in each case from the group SEQ 1-308 or a protein coding therefor.

[0066] In a further embodiment, the invention likewise relates to the use of the marker sequences according to the invention, preferably in the form of an arrangement as an affinity material for carrying out apheresis or, in the broader sense, dialysis, wherein substances from body fluids of a patient with multiple sclerosis, such as blood or plasma, bind to the marker sequences according to the invention and consequently can be selectively withdrawn from the body fluid.

### EXAMPLES AND FIGURES

[0067] Ten or more patient samples were individually screened against a cDNA expression library. The multiple sclerosis-specific expression clones were determined by way of comparison to ten or more healthy samples. The identity of the marker sequences was determined by way of DNA sequencing.

[0068] FIG. 1 shows the differential screening between two protein biochips from a cDNA expression library of a patient and a healthy participant, respectively. The differential clones are detected by way of fluorescent labeling and evaluated by way of bioinformatics.

[0069] Within the scope of the biomarker identification, various bioinformatics analyses are carried out. Reactivities against approximately 2000 different antigens are measured for each serum using microarrays. This data is used to rank the spotted antigens with respect to the differentiation capability thereof between healthy and diseased sera. This evaluation is carried out by way of the non-parametric Mann-Whitney tests using normalized intensity data. An internal standard, which is also spotted on each chip, is used for normalization purposes. Because a p-value is calculated for each antigen, methods for correcting multiple testing are employed. A very conservative approach that is taken is to carry out a Bonferroni correction, and additionally the less restrictive false discovery rate (FDR) according to Benjamini & Hochberg is calculated.

[0070] Additionally, the data is utilized to classify the sera. To this end, different multivariate methods are employed. These are methods selected from statistical learning methods such as support vector machines (SVM), neuronal networks or classification trees, as well as a threshold value method, which is suitable both for classifying and for visually representing the data.

[0071] So as to avoid overfitting, tenfold cross validation of the data is carried out.

TABLE A
(gi accession number valid as of Oct. 1, 2010)

| SEQ 1b-308b | SEQ 1a-308a | |
|---|---|---|
| gi Acc Protein | gi Acc cDNA | NAME |
| gi\|157266266 | gi\|157266265 | WD repeat-containing protein 86 [Homo sapiens] |
| gi\|63252910 | gi 63252909 | DDB1- and CUL4-associated factor 6 isoform b |
| | | [Homo sapiens] |
| gi\|18699734 | gi\|20357519 | uridine-cytidine kinase 2 [Homo sapiens] |
| gi\|4505677 | gi\|260436978 | calcium/calmodulin-dependent 3′,5′-cyclic |
| | | nucleotide phosphodiesterase 1B isoform 1 |
| | | [Homo sapiens] |
| gi\|51477716 | gi\|51477715 | alpha-mannosidase 2x [Homo sapiens] |
| gi\|24797097 | gi\|24797096 | pyrroline-5-carboxylate reductase 1, mitochondrial |
| | | isoform 1 [Homo sapiens] |
| gi\|61676188 | gi\|195963314 | E3 ubiquitin-protein ligase HUWE1 [Homo sapiens] |
| gi\|30795119 | gi\|30795118 | F-box only protein 18 isoform 2 [Homo sapiens] |
| gi\|33469964 | gi\|33469963 | splicing factor 4 [Homo sapiens] |
| gi\|83035136 | gi\|217272875 | F-box only protein 31 [Homo sapiens] |
| gi\|6005747 | gi\|54792140 | E3 ubiquitin-protein ligase RING2 [Homo sapiens] |
| gi\|33636722 | gi\|261278365 | lipid phosphate phosphatase-related protein type 4 |
| | | isoform 1 [Homo sapiens] |
| gi\|145199237 | gi\|145199236 | RNA exonuclease 1 homolog [Homo sapiens] |
| gi\|24308201 | gi\|41327713 | adipocyte membrane-associated protein |
| | | [Homo sapiens] |
| gi\|33356547 | gi\|33356546 | DNA replication licensing factor MCM2 |
| | | [Homo sapiens] |
| gi\|7662074 | gi\|209413745 | zinc finger and BTB domain-containing protein 5 |
| | | [Homo sapiens] |
| gi\|6005924 | gi\|115583673 | downregulated in renal cell carcinoma |
| | | [Homo sapiens] |
| gi\|4505685 | gi\|291084749 | pyruvate dehydrogenase E1 component subunit |
| | | alpha, somatic form, mitochondrial isoform 1 |
| | | precursor [Homo sapiens] |
| gi\|20070228 | gi\|39725676 | nucleobindin-1 precursor [Homo sapiens] |
| gi\|21700763 | gi\|46361989 | hematological and neurological expressed 1-like |
| | | protein [Homo sapiens] |
| gi\|19923927 | gi\|221139831 | general transcription factor 3C polypeptide 6 |
| | | [Homo sapiens] |
| gi\|26051235 | gi\|26051234 | nuclear pore complex protein Nup133 [Homo sapiens] |
| gi\|50593021 | gi\|50593020 | NFU1 iron-sulfur cluster scaffold homolog, |
| | | mitochondrial isoform 2 [Homo sapiens] |
| gi\|38454194 | gi\|38454193 | gamma-tubulin complex component 4 [Homo sapiens] |
| gi\|5902122 | gi\|197381953 | spectrin beta chain, brain 2 [Homo sapiens] |
| gi\|62739181 | gi\|62739180 | rhotekin isoform c [Homo sapiens] |
| gi\|215599981 | gi\|215599980 | cyclin-D-binding Myb-like transcription factor 1 |
| | | isoform b [Homo sapiens] |
| gi\|134288890 | gi\|148596939 | DIS3-like exonuclease 2 [Homo sapiens] |
| gi\|32698750 | gi\|32698749 | SR-related CTD-associated factor 1 [Homo sapiens] |
| gi\|4501887 | gi\|11038618 | actin, cytoplasmic 2 [Homo sapiens] |
| gi\|4758112 | gi\|93588182 | spliceosome RNA helicase BAT1 [Homo sapiens] |
| gi\|58331179 | gi\|58331178 | rho GTPase-activating protein 39 [Homo sapiens] |
| gi\|27477111 | gi\|119393888 | pre-mRNA-splicing factor SLU7 [Homo sapiens] |
| gi\|145309326 | gi\|145309325 | laminin subunit gamma-1 precursor [Homo sapiens] |
| gi\|4507145 | gi\|23111044 | sorting nexin-4 [Homo sapiens] |
| gi\|284055255 | gi\|284055254 | CM P-N-acetylneuraminate-beta-1,4-galactoside |
| | | alpha-2,3-sialyltransferase isoform a |
| gi\|33356547 | gi\|33356546 | DNA replication licensing factor MCM2 |
| | | [Homo sapiens] |
| gi\|13259508 | gi\|13259507 | dynactin 1 isoform 2 [Homo sapiens] |
| gi\|24797103 | gi\|24797102 | RAS guanyl releasing protein 2 [Homo sapiens] |
| gi\|20070228 | gi\|39725676 | nucleobindin 1 [Homo sapiens] |
| gi\|4502101 | gi\|4502100 | annexin I [Homo sapiens] |
| gi\|16975484 | gi\|92091602 | centaurin delta 2 isoform b [Homo sapiens] |
| gi\|21707902 | gi\|21707901 | CTTN protein [Homo sapiens] |
| gi\|29788785 | gi\|34222261 | tubulin, beta [Homo sapiens] |
| gi\|28827795 | gi\|40549398 | charged multivesicular body protein 4b |
| | | [Homo sapiens] |
| gi\|149363636 | gi\|149363635 | plexin-B2 precursor [Homo sapiens] |
| gi\|66346681 | gi\|66346680 | plasminogen activator inhibitor 1 RNA-binding |
| | | protein isoform 2 [Homo sapiens] |
| gi\|40548422 | gi\|40548421 | charged multivesicular body protein 4a |
| | | [Homo sapiens] |
| gi\|3005715 | gi\|3005714 | protein 4.1-G [Homo sapiens] |
| gi\|22035672 | gi\|87196331 | thioredoxin reductase 2 precursor [Homo sapiens] |
| gi\|4506723 | gi\|70609888 | ribosomal protein S3a [Homo sapiens] |
| gi\|34485727 | gi\|153792638 | NCK-associated protein 1-like [Homo sapiens] |
| gi\|6912602 | gi\|38569401 | arfaptin-2 [Homo sapiens] |
| gi\|4506685 | gi\|14591910 | 40S ribosomal protein S13 [Homo sapiens] |
| gi\|18104948 | gi\|78190465 | 60S ribosomal protein L21 [Homo sapiens] |
| gi\|167466201 | gi\|167466200 | WAS protein family homolog 1 [Homo sapiens] |
| gi\|24234688 | gi\|156071496 | stress-70 protein, mitochondrial precursor |
| | | [Homo sapiens] |
| gi\|307574659 | gi\|307574658 | hypothetical protein LOC116328 isoform 2 |
| | | [Homo sapiens] |
| gi\|4506619 | gi\|78190466 | 60S ribosomal protein L24 [Homo sapiens] |
| gi\|94536842 | gi\|94536841 | ribose 5-phosphate isomerase A [Homo sapiens] |
| gi\|4505753 | gi\|31543395 | phosphoglycerate mutase 1 [Homo sapiens] |
| gi\|11545918 | gi\|210147465 | tubulointerstitial nephritis antigen-like 1 |
| | | [Homo sapiens] |
| gi\|163644321 | gi\|163644320 | cytochrome b-c1 complex subunit Rieske, |
| | | mitochondrial [Homo sapiens] |
| gi\|34526674 | gi\|34526673 | unnamed protein product [Homo sapiens] |
| gi\|4505573 | gi\|166064031 | rho guanine nucleotide exchange factor 7 |
| | | isoform a [Homo sapiens] |
| gi\|5902122 | gi\|197381953 | spectrin beta chain, brain 2 [Homo sapiens] |
| gi\|23618848 | gi\|56676380 | protein SYS1 homolog isoform a [Homo sapiens] |
| gi\|83641870 | gi\|262331549 | nucleophosmin isoform 3 [Homo sapiens] |
| gi\|54112429 | gi\|54112428 | dedicator of cytokinesis protein 7 [Homo sapiens] |
| gi\|5453690 | gi\|5453689 | dnaJ homolog subfamily B member 1 [Homo sapiens] |
| gi\|10863945 | gi\|195963391 | X-ray repair cross-complementing protein 5 |
| | | [Homo sapiens] |
| gi\|16753215 | gi\|94538348 | profilin-2 isoform a [Homo sapiens] |
| gi\|149363636 | gi\|149363635 | plexin-B2 precursor [Homo sapiens] |
| gi\|27501458 | gi\|157951660 | chromosome transmission fidelity protein 18 |
| | | homolog [Homo sapiens] |
| gi\|205277463 | gi\|306518580 | transketolase [Homo sapiens] |
| gi\|21396500 | gi\|300116295 | HIRA interacting protein 3 [Homo sapiens] |
| gi\|71565154 | gi\|71565153 | alcohol dehydrogenase class-3 [Homo sapiens] |
| gi\|34147630 | gi\|169658370 | elongation factor Tu, mitochondrial precursor |
| | | [Homo sapiens] |
| gi\|5729875 | gi\|216547928 | membrane-associated progesterone receptor |
| | | component 1 [Homo sapiens] |
| gi\|50592996 | gi\|50592995 | tubulin beta-3 chain [Homo sapiens] |
| gi\|5802966 | gi\|58530846 | destrin isoform a [Homo sapiens] |
| gi\|19923315 | gi\|261862340 | serine hydroxymethyltransferase, mitochondrial |
| | | isoform 1 precursor [Homo sapiens] |
| gi\|31982933 | gi\|33946335 | DNA-binding protein inhibitor ID-2 [Homo sapiens] |
| gi\|4506713 | gi\|294459919 | ubiquitin-40S ribosomal protein S27a precursor |
| | | [Homo sapiens] |
| gi\|16753227 | gi\|67189547 | 60S ribosomal protein L6 [Homo sapiens] |
| gi\|50592996 | gi\|50592995 | tubulin beta-3 chain [Homo sapiens] |
| gi\|55743075 | gi\|96322659 | angio-associated migratory cell protein |
| | | [Homo sapiens] |
| gi\|13569962 | gi\|116014337 | ras-related protein Rab-1B [Homo sapiens] |
| gi\|78395056 | gi\|78395055 | C15orf23 protein [Homo sapiens] |
| gi\|45439359 | gi\|45439358 | triple functional domain protein [Homo sapiens] |
| gi\|34335253 | gi\|254911094 | disks large-associated protein 4 isoform a |
| | | [Homo sapiens] |
| gi\|34098946 | gi\|109134359 | nuclease-sensitive element-binding protein 1 |
| | | [Homo sapiens] |
| gi\|195972909 | gi\|195972908 | nasal embryonic luteinizing hormone-releasing |
| | | Homo sapiens isoform a [Homo sapiens] |
| gi\|8394499 | gi\|283945567 | ubiquitin-associated protein 1 isoform 1 |
| | | [Homo sapiens] |
| gi\|24234688 | gi\|296080701 | stress-70 protein, mitochondrial precursor |
| | | [Homo sapiens] |
| gi\|4758138 | gi\|221139768 | probable ATP-dependent RNA helicase DDX5 |
| | | [Homo sapiens] |
| gi\|34335251 | gi\|109891935 | disks large-associated protein 4 isoform b |
| | | [Homo sapiens] |
| gi\|11342680 | gi\|197245402 | beta-centractin [Homo sapiens] |
| gi\|5453832 | gi\|169234641 | hypoxia up-regulated protein 1 precursor |
| | | [Homo sapiens |
| gi\|34098946 | gi\|109134359 | nuclease-sensitive element-binding protein 1 |
| | | [Homo sapiens] |
| gi\|154090959 | gi\|154090958 | WASH complex subunit FAM21B [Homo sapiens] |
| gi\|4506913 | gi\|209693454 | beta-sarcoglycan [Homo sapiens] |
| gi\|247425318 | gi\|247425317 | immunoglobulin heavy chain variable region |
| | | [Homo sapiens] |
| gi\|5031701 | gi\|95104789 | follistatin-like 3 (secreted glycoprotein) |
| gi\|13375616 | gi\|34304362 | fatty acid desaturase 3 [Homo sapiens] |
| gi\|13376888 | gi\|34147389 | transmembrane protein 121 [Homo sapiens] |
| gi\|17986283 | gi\|17986282 | tubulin alpha-1A chain [Homo sapiens] |
| gi\|5031669 | gi\|39725675 | cyclin-dependent kinase 2-associated protein 2 |
| | | [Homo sapiens] |
| gi\|14249132 | gi\|270309185 | protein BEX2 isoform 3 [Homo sapiens] |
| gi\|22027541 | gi\|22027540 | programmed cell death protein 7 [Homo sapiens] |
| gi\|4507761 | gi\|77539056 | ubiquitin-60S ribosomal protein L40 precursor |
| | | [Homo sapiens] |
| gi\|19353009 | gi\|19353008 | Similar to Elongation factor 2b [Homo sapiens] |
| gi\|110815842 | gi\|34147354 | dysbindin domain-containing protein 1 isoform 2 |
| | | [Homo sapiens] |
| gi\|171846268 | gi\|291084495 | elongation factor Ts, mitochondrial isoform 2 |
| | | precursor [Homo sapiens] |
| gi\|4557325 | gi\|48762938 | apolipoprotein E precursor [Homo sapiens] |
| gi\|41406055 | gi\|228008404 | amyloid beta A4 protein isoform b precursor |
| | | [Homo sapiens]. |
| gi\|23510421 | gi\|23510420 | tumor necrosis factor receptor superfamily; member |
| | | 6 isoform 2 precursor [Homo sapiens] |
| gi\|15718706 | gi\|122056469 | caspase 8 isoform B precursor [Homo sapiens] |
| gi\|119575060 | | Homo sapiens CD24 molecule (CD24) |
| gi\|17978489 | gi\|68508947 | Homo sapiens CD97 molecule (CD97); transcript |
| | | variant 1 |
| gi\|52630326 | gi\|158420733 | chromodomain helicase DNA binding protein 3 |
| | | [Homo sapiens] |
| gi\|4503481 | gi\|83656774 | eukaryotic translation elongation factor 1 gamma |
| | | [Homo sapiens] |
| gi\|116063573 | gi\|160420313 | filamin A; alpha isoform 1 [Homo sapiens]. |
| gi\|4503979 | gi\|196115280 | glial fibrillary acidic protein isoform 1 |
| | | [Homo sapiens] |
| gi\|150418002 | gi\|150418001 | HLA class II histocompatibility antigen, DQ beta 1 |
| | | chain precursor [Homo sapiens] |
| gi\|55925614 | gi\|55925613 | interferon alpha-inducible protein 27, mitochondrial |
| | | isoform 2 [Homo sapiens] |
| gi\|10835145 | gi\|27894305 | interleukin 1; beta proprotein [Homo sapiens] |
| gi\|28610151 | gi\|28610150 | interleukin-7 receptor subunit alpha precursor |
| | | [Homo sapiens] |
| gi\|119703755 | gi\|119703754 | laminin; beta 2 precursor [Homo sapiens]. |
| gi\|5031877 | gi\|27436949 | Lamin B1 [Homo sapiens] |
| gi\|82534351 | gi\|189409155 | microtubule-associated protein tau isoform 1 |
| gi\|4505241 | gi\|98991774 | protein Mpv17 [Homo sapiens] |
| gi\|222136617 | gi\|222136616 | interferon-induced GTP-binding protein Mx1 |
| | | [Homo sapiens] |
| gi\|105990539 | gi\|197927150 | neurofilament; light polypeptide 68 kDa |
| | | [Homo sapiens] |
| gi\|27886561 | gi\|27886560 | nuclear factor of activated T-cells, cytoplasmic 3 |
| | | isoform 1 [Homo sapiens] |
| gi\|205360954 | gi\|205360953 | polycystin-1 isoform 1 precursor [Homo sapiens] |
| gi\|32171249 | gi\|38505192 | prostaglandin-H2 D-isomerase [Homo sapiens] |
| gi\|18641347 | gi\|115385975 | Homo sapiens protein tyrosine phosphatase; |
| | | receptor type; C (PTPRC); transcript variant 1 |
| gi\|4506367 | gi\|209915550 | ras-related protein Rab-3A [Homo sapiens] |
| gi\|4506701 | gi\|71772514 | 40S ribosomal protein S23 [Homo sapiens] |
| gi\|4506841 | gi\|56119169 | C-C motif Chemokine 2 precursor [Homo sapiens] |
| gi\|19557702 | gi\|157266286 | surfeit 6 [Homo sapiens] |
| gi\|21359969 | gi\|141801742 | DNA-directed RNA polymerase III subunit RPC3 |
| | | [Homo sapiens] |
| gi\|5803227 | gi\|21464103 | 14-3-3 protein theta [Homo sapiens] |
| gi\|148747351 | gi\|296841089 | protein kinase C and casein kinase substrate in |
| | | neurons 2 [Homo sapiens] |
| gi\|11321634 | gi\|125987597 | CD2-associated protein [Homo sapiens] |
| gi\|223468620 | gi\|223468619 | E3 ubiquitin-protein ligase makorin-1 isoform 1 |
| | | [Homo sapiens] |
| gi\|24308113 | gi\|291190751 | KIF1 binding protein [Homo sapiens]. |
| gi\|82617630 | gi\|82617629 | Cytoplasmic FMR1 interacting protein 2 |
| | | [Homo sapiens] |
| gi\|48949851 | gi\|48949850 | HERV-W_7q21.2 provirus ancestral Env polyprotein |
| | | precursor [Homo sapiens] |
| gi\|7706702 | gi\|28144902 | interleukin-23 subunit alpha precursor |
| | | [Homo sapiens] |
| gi\|115299754 | gi\|115299753 | dysbindin domain-containing protein 2 isoform b |
| | | [Homo sapiens] |
| gi\|70887780 | gi\|70887779 | Homo sapiens sperm associated antigen 16 |
| gi\|119120897 | gi\|119120896 | partitioning defective 3 homolog B isoform b |
| | | [Homo sapiens] |
| gi\|209969690 | gi\|209969689 | hypothetical protein LOC119032 [Homo sapiens] |
| gi\|187960086 | gi\|187960086 | cytochrome P450 4V2 [Homo sapiens] |
| gi\|6978649 | gi\|242246959 | choline/ethanolamine kinase [Homo sapiens] |
| gi\|4506649 | gi\|76496470 | 60S ribosomal protein L3 isoform a [Homo sapiens] |
| gi\|27545326 | gi\|55956799 | SWI/SNF related, matrix associated, actin |
| | | dependent regulator of chromatin, subfamily b, |
| | | member 1 [Homo sapients] |
| gil\|15527080 | gi\|115527079 | metastasis-associated protein MTA1 [Homo sapiens] |
| gi\|56788399 | gi\|56788398 | GI: 56788398 |
| gi\|239787092 | gi\|239787091 | TNFAIP3-interacting protein 2 isoform 1 |
| | | [Homo sapiens] |
| gi\|54112429 | gi\|54112428 | dedicator of cytokinesis protein 7 [Homo sapiens] |
| gi\|4504603 | gi\|50593016 | Interferon beta1 |
| gi\|4504605 | gi\|4504604 | Interferon omega |
| gi\|10834984 | gi\|224831235 | Interleukin IL-6 |
| gi\|10835141 | gi\|24430216 | Interleukin IL-10 |
| gi\|24430219 | gi\|24430218 | interleukin-12 subunit alpha precursor |
| | | [Homo sapiens] |
| gi\|24497438 | gi\|24497437 | interleukin-12 subunit beta precursor |
| | | [Homo sapiens] |
| gi\|25306235 | gi\|219842281 | brain-derived neurotrophic factor isoform b |
| | | preproprotein [Homo sapiens] |
| gi\|4758020 | gi\|209574322 | ciliary neurotrophic factor [Homo sapiens] |
| gi\|10834978 | gi\|28610153 | interleukin-8 precursor [Homo sapiens] |
| gi\|89903008 | gi\|237858673 | neurofascin isoform 4 precursor [Homo sapiens] |
| gi\|17158044 | gi\|17158043 | ribosomal protein S6 [Homo sapiens] |
| gi\|51476647 | gi\|51476646 | Ankyrin repeat and SAM domain-containing protein 6 |
| gi\|72534660 | gi\|197209865 | splicing factor, arginine/serine-rich 7 [Homo sapiens] |
| gi\|13128968 | gi\|13128967 | dual specificity phosphatase 26 [Homo sapiens] |
| gi\|22538467 | gi\|22538466 | proteasome (prosome, macropain) subunit, beta |
| | | type, 4 [Homo sapiens] |
| gi\|15055539 | gi\|70609878 | ribosomal protein S2 [Homo sapiens] |
| gi\|3129006 | gi\|13129005 | DEAD (Asp-Glu-Ala-Asp) box polypeptide 50 |
| | | [Homo sapiens] |
| gi\|4506663 | gi\|72377361 | ribosomal protein L8 [Homo sapiens] |
| gi\|19923193 | gi\|21237722 | suppression of tumorigenicity 13 (colon carcinoma) |
| | | (Hsp70 interacting protein) (ST13) |
| gi\|4506649 | gi\|76496470 | ribosomal protein L3 isoform a [Homo sapiens] |
| gi\|4506743 | gi\|4506742 | ribosomal protein S8 [Homo sapiens] |
| gi\|5031877 | gi\|27436949 | lamin B1 [Homo sapiens] |
| gi\|94536842 | gi\|94536841 | ribose 5-phosphate isomerase A [Homo sapiens] |
| gi\|17157993 | gi\|141803509 | olfactomedin 2 [Homo sapiens] |
| gi\|8922911 | gi\|8922910 | radical S-adenosyl methionine domain containing 1 |
| | | [Homo sapiens] |
| gi\|4826724 | gi\|17105402 | zygin 1 isoform 1 [Homo sapiens] |
| gi\|6806913 | gi\|187960101 | centaurin, alpha 1 [Homo sapiens] |
| gi\|5454058 | gi\|5454057 | ST3 beta-galactoside alpha-2,3-sialyltransferase 4 |
| | | [Homo sapiens] |
| gi\|54607091 | gi\|54607090 | SUMO1/sentrin/SMT3 specific protease 2 [Homo sapiens] |
| gi\|166063995 | gi\|166063994 | general transcription factor IIIA [Homo sapiens] |
| gi\|72534684 | gi\|166197669 | phospholipase D family, member 3 [Homo sapiens] |
| gi\|14591909 | gi\|71772259 | ribosomal protein L5 [Homo sapiens] |
| gi\|114l5026 | gi\|15431299 | ribosomal protein L18a [Homo sapiens] |
| gi\|13129004 | gi\|30089943 | GIY-YIG domain containing 2 isoform 1 [Homo sapiens] |
| gi\|62414289 | gi\|240849334 | vimentin [Homo sapiens] |
| gi\|110347461 | gi\|110347460 | MYC-associated zinc finger protein isoform 1 |
| | | [Homo sapiens] |
| gi\|4758648 | gi\|187761329 | kinesin family member 5B [Homo sapiens] |
| gi\|4502337 | gi\|38372939 | alpha-2-glycoprotein 1, zinc-binding [Homo sapiens] |
| gi\|6912642 | gi\|142383813 | sex comb on midleg 1 isoform 2 [Homo sapiens] |
| gi\|4503065 | gi\|62241006 | crystallin, mu isoform 1 [Homo sapiens] |
| gi\|4505409 | gi\|66392201 | nucleoside diphosphate kinase B [Homo sapiens] |
| gi\|4507791 | gi\|150417997 | ubiquitin-conjugating enzyme E2M (UBC12 |
| | | homolog, yeast) |
| gi\|7657015 | gi\|187936926 | hypothetical protein LOC51493 [Homo sapiens] |
| gi\|16554609 | gi\|16554608 | 28S ribosomal protein S11, mitochondrial isoform a |
| | | [Homo sapiens] |
| gi\|29725611 | gi\|30065641 | serine/threonine-protein phosphatase 2A activator |
| | | isoform b [Homo sapiens] |
| gi\|5902082 | gi\|151101481 | ST3 beta-galactoside alpha-2,3-sialyltransferase 2 |
| | | [Homo sapiens] |
| gi\|29893564 | gi\|34222264 | microspherule protein 1 isoform 1 [Homo sapiens] |
| gi\|19923796 | gi\|142359942 | 60S ribosomal export protein NMD3 [Homo sapiens] |
| gi\|4506661 | gi\|18390348 | ribosomal protein L7a [Homo sapiens] |
| gi\|16579885 | gi\|16579884 | 60S ribosomal protein L4 [Homo sapiens] |
| gi\|40548389 | gi\|66346686 | dickkopf homolog 3 precursor [Homo sapiens] |
| gi\|5453880 | gi\|221219065 | acidic (leucine-rich) nuclear phosphoprotein 32 |
| | | family, member A [Homo sapiens] |
| gi\|22035558 | gi\|48833509 | transcription factor IIIB 90 kDa subunit isoform 3 |
| | | [Homo sapiens] |
| gi\|4506617 | gi\|78000184 | ribosomal protein L17 [Homo sapiens] |
| gi\|27545323 | gi\|168229166 | chondroitin polymerizing factor [Homo sapiens] |
| gi\|62750347 | gi\|62750346 | histone deacetylase 5 isoform 1 [Homo sapiens] |
| gi\|100913206 | gi\|00913205 | ATP-dependent RNA helicase A [Homo sapiens] |
| gi\|106879210 | gi\|106879209 | SH2 domain-containing adapter protein B |
| | | [Homo sapiens] |
| gi\|18152783 | gi\|18490985 | 60S ribosomal protein L10-like [Homo sapiens] |
| gi\|15431301 | gi\|72187675 | ribosomal protein L7 [Homo sapiens] |
| gi\|13375618 | gi\|114155130 | 24-dehydrocholesterol reductase precursor |
| | | [Homo sapiens] |
| gi\|14043070 | gi\|83641894 | heterogeneous nuclear ribonucleoprotein A1 |
| | | [Homo sapiens] |
| gi\|22202633 | gi\|88999578 | prefoldin subunit 5 isoform alpha [Homo sapiens] |
| gi\|22907052 | gi\|300360513 | actin-related protein 2/3 complex subunit 1A isoform |
| | | 1 [Homo sapiens] |
| gi\|23308577 | gi\|217272837 | D-3-phosphoglycerate dehydrogenase [Homo sapiens] |
| gi\|34098946 | gi\|109134359 | nuclease-sensitive element-binding protein 1 |
| | | [Homo sapiens] |
| gi\|4502015 | gi\|109637793 | A-kinase anchor protein 1 precursor [Homo sapiens] |
| gi\|4502027 | gi\|215982788 | albumin preproprotein [Homo sapiens] |
| gi\|4506631 | gi\|15812218 | 60S ribosomal protein L30 [Homo sapiens] |
| gi\|4506667 | gi\|49087144 | 60S acidic ribosomal protein P0 Homo sapiens] |
| gi\|4508007 | gi\|197382778 | zinc finger protein 174 isoform a [Homo sapiens] |
| gi\|5031851 | gi\|44889961 | stathmin isoform a [Homo sapiens] |
| gi\|52630322 | gi\|58420732 | chromodomain-helicase-DNA-binding protein 3 |
| | | isoform 2 [Homo sapiens] |
| gi\|87080813 | gi\|87080812 | LON peptidase N-terminal domain and ring finger 1 |
| | | [Homo sapiens] |
| gi\|9945439 | gi\|90193629 | septin-5 [Homo sapiens] |
| gi\|5803013 | gi\|77628146 | endoplasmic reticulum protein 29 isoform 1 |
| | | precursor [Homo sapiens] |
| gi\|168229248 | gi\|168229247 | asparagine synthetase [Homo sapiens] |
| gi\|90652861 | gi\|90652860 | protein tyrosine phosphatase, non-receptor type 5 |
| | | (striatum-enriched) isoform b [Homo sapiens] |
| gi\|58761502 | gi\|58761501 | GTP-binding protein PTD004 isoform 2 [Homo sapiens] |
| gi\|94538370 | gi\|94538369 | DnaJ (Hsp40) homolog, subfamily C, member 2 |
| | | isoform 1 [Homo sapiens] |
| gi\|10047104 | gi\|110227859 | synovial sarcoma translocation gene on |
| | | chromosome 18-like 2 [Homo sapiens] |
| gi\|9951915 | gi\|239937553 | S-adenosylhomocysteine hydrolase [Homo sapiens] |
| gi\|4507729 | gi\|68299771 | tubulin, beta 2 [Homo sapiens] |
| gi\|5031875 | gi\|153281091 | lamin A/C isoform 2 [Homo sapiens] |
| gi\|41393561 | gi\|41393560 | leucine aminopeptidase 3 [Homo sapiens] |
| gi\|157885806 | gi\|157885805 | chromosome 12 open reading frame 51 [Homo sapiens] |
| gi\|119624431 | 0 | hCG2041192 [Homo sapiens] |
| gil\|12382250 | gi\|112382249 | spectrin, beta, non-erythrocytic 1 isoform 1 |
| | | [Homo sapiens] |
| gi\|93141029 | gi\|93141028 | paralemmin isoform 2 [Homo sapiens] |
| gi\|4501867 | gi\|46411160 | aconitase 2 precursor [Homo sapiens] |
| gi\|88758580 | gi\|221554513 | cyclin L2 isoform A [Homo sapiens] |
| gi\|5901922 | gi\|39995072 | cell division cycle 37 protein [Homo sapiens] |
| gi\|21624607 | gi\|23510452 | coactosin-like 1 [Homo sapiens] |
| gi\|24234747 | gi\|24234746 | interleukin enhancer binding factor 2 [Homo sapiens] |
| gi\|160420328 | gi\|160420327 | iron-sulfur cluster assembly 2 [Homo sapiens] |
| gi\|6005743 | gi\|62241020 | DEAD (Asp-Glu-Ala-As) box polypeptide 19 isoform |
| | | 1 [Homo sapiens] |
| gi\|15010818 | gi\|15010817 | JKTBP1delta6 [Homo sapiens] |
| gi\|4502847 | gi\|186972139 | cold inducible RNA binding protein [Homo sapiens] |
| gi\|71164894 | gi\|71164893 | trinucleotide repeat containing 4, isoform CRA_a |
| | | [Homo sapiens] |
| gi\|4758206 | gi\|187608704 | dual specificity phosphatase 2 [Homo sapiens] |
| gi\|5730009 | gi\|115387097 | ret finger protein [Homo sapiens] |
| gi\|7657689 | gi\|21327683 | YME1-like 1 isoform 3 [Homo sapiens] |
| gi\|28872792 | gi\|28872791 | CDK5 regulatory subunit associated protein 3 |
| | | [Homo sapiens] |
| gi\|15147333 | gi\|189458899 | tripartite motif-containing 37 protein [Homo sapiens] |
| gi\|29826319 | gi\|29826318 | adducin 1 (alpha) isoform a [Homo sapiens] |
| gi\|190194416 | gi\|190194415 | F-box and leucine-rich repeat protein 15 |
| | | [Homo sapiens] |
| gi\|4758272 | gi\|46389548 | endosulfine alpha isoform 3 [Homo sapiens] |
| gi\|166795250 | gi\|166795249 | kinesin family member 2C [Homo sapiens] |
| gi\|151301215 | gi\|151301214 | widely-interspaced zinc finger motifs [Homo sapiens] |
| gi\|46048234 | gi\|194294559 | nucleolar protein 8 [Homo sapiens] |
| gi\|219842250 | gi\|219842249 | periphilin 1 isoform 8 [Homo sapiens] |
| gi\|48762942 | gi\|48762941 | huntingtin interacting protein-1-related |
| | | [Homo sapiens] |
| gi4506003 | gi\|45827796 | protein phosphatase 1, catalytic subunit, alpha |
| | | isoform 1 [Homo sapiens] |
| gi\|67782338 | gi\|67782337 | amyloid precursor-like protein 1 isoform 1 precursor |
| | | [Homo sapiens] |
| gi\|17402896 | gi\|17402895 | RAD51 homolog C isoform 1 [Homo sapiens] |
| gi\|5453629 | gi\|34335254 | dynactin 2 [Homo sapiens] |
| gi\|11968182 | gi\|14165467 | ribosomal protein S18 [Homo sapiens] |
| gi\|122937289 | gi\|122937288 | kinesin family member 18B [Homo sapiens] |
| gi\|155029542 | gi\|155029541 | BEN domain containing 7 isoform 1 [Homo sapiens] |
| gi\|11321585 | gi\|20357526 | guanine nucleotide-binding protein, beta-1 subunit |
| | | [Homo sapiens] |
| gi\|12597635 | gi\|12597634 | B-cell CLL/lymphoma 11B isoform 2 [Homo sapiens] |
| gi\|4502751 | gi\|17981697 | cyclin-dependent kinase inhibitor 2C (p18, inhibits |
| | | CDK4), isoform CRA_b [Homo sapiens] |
| gi\|7662046 | gi\|7662045 | myeloid/lymphoid or mixed-lineage leukemia 4 |
| | | [Homo sapiens] |
| gi\|37537687 | gi\|37537686 | zinc finger protein 444 [Homo sapiens] |
| gi\|133922582 | gi\|133922581 | zinc finger protein 358 [Homo sapiens] |
| gi\|189083826 | gi\|189083825 | inhibitor of growth family, member 4 isoform 3 |
| | | [Homo sapiens] |
| gi\|110224479 | gi\|110224478 | prosaposin isoform c preproprotein [Homo sapiens] |
| gi\|21264343 | gi\|21264342 | scaffold attachment factor B [Homo sapiens] |
| gi\|14670375 | gi\|14670374 | SCG10-like-protein [Homo sapiens] |
| gi\|12545395 | gi\|94721348 | islet cell autoantigen 1 [Homo sapiens] |
| gi\|91199552 | gi\|91199551 | ADP-ribosylation factor-like protein 16 |
| | | [Homo sapiens] |
| gi\|21614499 | gi\|161702984 | ezrin [Homo sapiens] |
| gi\|5453690 | gi\|5453689 | DnaJ (Hsp40) homolog, subfamily B, member 1 |
| | | [Homo sapiens] |
| gi\|20070228 | gi\|39725676 | nucleobindin 1 [Homo sapiens] |
| gi\|12667788 | gi\|225703132 | myosin, heavy polypeptide 9, non-muscle |
| | | [Homo sapiens] |
| gi\|5902158 | gi\|215422343 | ring finger protein 113A [Homo sapiens] |
| gi\|62241011 | gi\|62241010 | v-akt murine thymoma viral oncogene homolog 1 |
| | | [Homo sapiens] |
| gi\|27734911 | gi\|27734910 | DAZ interacting protein 1-like [Homo sapiens] |
| gi\|7669492 | gi\|83641890 | glyceraldehyde-3-phosphate dehydrogenase |
| | | [Homo sapiens] |
| gi\|7657514 | gi\|21314660 | GTP-binding protein RHO6 [Homo sapiens] |
| gi\|38257139 | gi\|38257138 | protein kinase, cAMP-dependent, regulatory, type I, |
| | | beta [Homo sapiens] |
| gi\|23503295 | gi\|26787971 | casein kinase 2, beta polypeptide [Homo sapiens] |
| gi\|20128774 | gi\|47519746 | mitogen-activated protein kinase 11 [Homo sapiens] |
| gi\|4759274 | gi\|215422360 | thioredoxin-like 1 [Homo sapiens] |
| gi\|32189394 | gi\|50345985 | ATP synthase, H+ transporting, mitochondrial F1 |
| | | complex, beta subunit precursor [Homo sapiens] |

The application's sequence listing, which the Patent Office published only in electronic form, follows.

SEQUENCE LISTING (308 sequences)

SEQ ID NO: 1 - DNA, 557 bp, Homo Sapiens
ccattaagaaggaagaattaactatgagaggtcgcatcaccatcaccatcacggatcctatttaggtgacactatagaatcgtcgacccacgcgtccgcccacgcgtccgcccacgcgtccgcccacgcgtccggcggggcgctcggcttcccgtgttcctctccccgccccagccccgtgggcgcgagaggaggcggggggctccttgtgcaccagagacgcagctgccttgttcgcccggtggggtgtggatcctccgagcggtgctgggaagggggttctctctgcccgcgcgcccaggactctacccagggcggaggtcccgagtgggccgccccccgcagcgccctgggttcgcgggcccagaggctggaggcagcggggagctagggtccttcaccctcccctcgccgcgtgcctccgcaggagtcgggctccccgttccccgcgatggccgcgggccgcagtcgtacggagccgccgcgcggaccccggggcgcccctccctagcggggcgcagctccttcttgttccccgccctgccagcgggatgggg

SEQ ID NO: 2 - DNA, 955 bp, Homo Sapiens
atgagaggatcgcatcaccatcaccatcacggatcctatttaggtgacactatagaatcgtcgacccacgcgtccgcacagagctcagtgcaaccaccagaaggagacagtgaaacaaaagctcctgaagaatcatcagaggatgtgacaaaatatcaggaaggagtatctgcagaaaacccagttgagaaccatatcaatataacacaatcagataagttcacagccaagccattggattccaactcaggagaaagaaatgacctcaatcttgatcgctcttgtggggttccagaagaatctgcttcatctgaaaaagccaaggaaccagaaacttcagatcagactagcactgagagtgctaccaatgaaaataacaccaatcctgagcctcagttccaaacagaagccactgggccttcagctcatgaagaaacatccaccagggactctgctcttcaggacacagatgacagtgatgatgacccagtcctgatcccaggtgcaaggtatcgagcaggacctggtgatagacgctctgctgttgcccgtattcaggagttcttcagacggagaaaagaaaggaaagaaatggaagaattggatactttgaacattagaaggccgctagtaaaaatggtttataaaggccatcgcaactccaggacaatgataaaagaagccaatttctggggtgctaactttgtaatgagtggttctgactgtggccacattttcatctgggatcggcacactgctgagcatttgatgcttctggaagctgataatcatgtggtaaactgcctgcagccacatccgtttgacccaattttagcctcatctggcatagattatgacataaagatctggtcaccattagaagagtcaaggatttttaaccgaaaacttgctgatgaagttataactcgaaacgaactcatgctggaagaaacta

SEQ ID NO: 3 - DNA, 1129 bp, Homo Sapiens
aatttttaaggagggagaaattaactatgagaggtcgcatcaccatcaccatcacggatcctatttaggtgacactatagaatcgtcgacccacgcgtccggctccttcgggaaacccagccccgtcaccgggctccgagcggctcgcaggcgagcgacagcggcctcagccccggcagcgcccagcggcggctgcggaaagcggagggagtccgacgcgggcgcgggcggggagcgtgcgtccgttcgcacaggcagcgggaggaggggcggcgcgaaccatggccggggacagcgagcagaccctgcagaaccaccagcagcccaacggcggcgagcccttccttataggcgtcagcgggggaacagctagcggcaagtcttccgtgtgtgctaagatcgtgcagctcctggggcagaatgaggtggactatcgccagaagcaggtggtcatcctgagccaggatagcttctaccgtgtccttacctcggagcagaaggccaaagccctgaagggccagttcaactttgaccacccggatgcctttgacaatgaactcattctcaaaacactcaaagaaatcactgaagggaaaacagtccagatccccgtgtatgactttgtctcccattcccggaaggaggagacagttactgtctatcccgcagacgtggtgctctttgaagggatcctggccttctactcccaggaggtacgagacctgttccagatgaagctttttgtggatacagatgcggacacccggctctcacgcagagtattaagggacatcagcgagagaggcagggatcttgagcagattttatctcagtacattacgtttcgttaagcctgcctttgaagaattctgcttgccaacaaagaagtatgctgatgtgatcatccctagaggtgcagataatctggtggccatcaacctcatcgtgcagcacatccaggacatcctgaatggagggccctccaaacggcagaccaatggctgtcctcaacggctaacccccttcacgcagagcaggcatcggagtccagcagcaggccgcatgacccgtctcatcggacccacccctatctccaagaagaaaaagaaggggtcaggaagcactgctt

SEQ ID NO: 4 - DNA, 1079 bp, Homo Sapiens
attttaagaaggaagaattaactatgagaggtcgcatcaccatcaccatcacggatcctatttaggtgacactatagaatcgtcgacccacgcgtccggattgatgcacgatgatgagatgaacattttcatcaacctcaccaaggatgagtttgtagaactccgagccctggtcattgagatggtgttggccacagacatgtcctgccatttccagcaagtgaataccatgaaaacagccttgcaacagctggacaggattgacaagcccaaggccctgtctctactgctccatgctgctgacatcagccacccaaccaagcagtggttggtccacagccgttggaccaaggccctcatggaggaattcttccgtcagggtgacaaggaggcagagttgggcctgcccttttctccactctgagaccgcacttccactctagtgggacagtctcgcatagggttcatcgacttcattgtggagcccacattctctgtgctgactgacgtggcatacaatagtgttcagaccctggcggatgaggactccaagtctaaaaaccaacccacctttcaatggcgccagccctctctggatgtggaagtgggagaccccaaccctgatgtggtcagctttcgttccacctgggtcaagcgcattcaggagaataagcaaaaatggaaggaacgggcagcaagtggcatcaccaaccagatgtccattgacgagctgtccccctgtgataagaggcccccccatcccctgccgaagatgaacacaaccaaatgggaatctggattatcctggggctggcccagttcttcattgagtccaaagtgtttgatgtcatcagcaccatccatcaggactggctcccccatctgctcaaggaaccgtgatcgtgaaagaaactaccccctgagggcgactgcctagatttgtcgttggttaagctctcatcctacctgactgcgctgagtgcacttgacgtgacgctcgaaactcagacgtcgtctactgtgttgacgtgccaacatccacactagatgtcttaatgtataggtgacacaaagaagcg

SEQ ID NO: 5 - DNA, 1084 bp, Homo Sapiens
aattttaggaggagaatttaactatgagaggtcgcatcaccatcaccatcacggatcctatttaggtgacactatagaatcgtcgacccacgcgtccgcccggcccagcttcttctccatctccccgcaggactgccagtttgctttggggggccggggtcagaagccagagctgcagatgctcactgtgtcggaggagctgccgtttgacaacgtggatggtggtgtgtggaggcaaggcttcgacatctcctacgacccgcacgactgggatgctgaagacctgcaggtgtttgtggtgccccactctcacaatgacccaggctggatcattacctttgacaagtactacacagagcagacccaacacatcctcaatagcatggtgtctaagctgcaggaggacccccggcggcgcttcctctgggcagaggtctccttcttcgccaagtggtgggacaacatcaatgtccaaaagagagcggcagtccgaaggctggtgggaaacgggcagctggagattgcgacaggaggctgggtgatgccagatgaggccaattcccactactttgcattgattgaccagctcatcgaaggacaccagtggctggagagaaatcttggtgcaaccccccgctctggctgggcagtggacccctttggatacagctccaccatgccttacctgctgcgccgtgccaacctcaccagcatgctgattcagagagtgcactatgccatcaagaagcactttgctgccacccacagcctagagttcatgtggaggcagacatgggactcggactccagcacagacatcttctgtcacatgatgcccttctacagctatgacgtcccccatacctgtggcccagatcccaagatctgctgccaatttgatttcaaacgcctgcctggtgggcgcatcaactgcccttggaaggtgccacccgggccatcacagaggccaccgtggcagagaggcagccctgcttctggaccataccagaagagtctcggctgttccgagcacgttctctgtgcctcctgaaatgactcgaattgacagcccagagtgggtatg

SEQ ID NO: 6 - DNA, 939 bp, Homo Sapiens
tccttttaaggaaaggagaaattaactatgagaggtcgcatcaccatcaccatcacggatcctatttaggtgacactatagaatcgtcgacccacgcgtccggctccgggaatgagccggtgccatctgtgggggctttgggccaggggtctccggacagcatgagcgtgggcttcatcggcgctggccagctggcttttgccctggccaagggcttcacagcagcaggcgtcttggctgcccacaagataatggctagctccccagacatggacctggccacagtttctgctctcaggaagatgggggtgaagttgacaccccacaacaaggagacggtgcagcacagtgatgtgctcttcctggctgtgaagccacacatcatccccttcatcctggatgaaataggcgccgacattgaggacagacacattgtggtgtcctgcgcggccggcgtcaccatcagctccattgagaagaagctgtcagcgtttcggccagcccccagggtcatccgctgcatgaccaacactccagtcgtggtgcgggagggggccaccgtgtatgccacaggcacgcacgcccaggtggaggacgggaggctcatggagcagctgctgagcagcgtgggcttctgcacggaggtggaagaggacctgattgatgccgtcacggggctcagtggcagcggccccgcctacgcattcacagccctggatgccctggctgatgggggtgtgaagatgggacttccaaggcgcctggcagtccgcctcggggcccaggccctcctgggggctgccaagatgctgctgcactcagaacagcacccaaggccagctcaaggacaacgtcagcttctcctggtggggccaccatccatgccttgcatgtgctggagagtggggctttcctctcccctgcttatcaacgctgagg

SEQ ID NO: 7 - DNA, 1093 bp, Homo Sapiens
tttttataagaagggagaaattaactatgagaggtcgcatcaccatcaccatcacggatcctatttaggtgacactatagaatcgtcgacccacgcgtccgcccacgcgtccgcggacgcgtgggtggaaaatgatgtctccacactaggctatgacctcaccttcagcactgaggtccaagagtttggagtttgtgaagttcgtgacctcaaacccaatggggccaacatcttggtaacagaggagaataagaaggagtatgtacacctggtatgccagatgagaatgacaggagccatccgcaagcagttggcggctttcttagaaggcttctatgagatcattccaaagcgcctcatttccatcttcactgagcaggagttagagctgcttatatcaggactgcccaccattgacatcgatgatctgaaatccaacactgaataccacaagtaccagtccaactctattcagatccagtggttctggagagcattgcgttctttcgatcaagctgaccgtgccaagttcctccagtttgtcacgggtacttccaaggtacccctgcaaggctttgctgccctcgaaggcatgaatggcattcagaagtttcagatccatcgagatgacaggtccacagatcgcctgccttcagctcacacatgttttaatcagctggatctgcctgcctatgagagctttgagaagctccgccacatgctactgttggctatccaggagtgctctgaaggctttgggctggcctaataaggccctgcccaactccgtggggttttttttaccattgttggacctggggaggggggagttaaaaaaagaaccagaaagaaattgtcaaaaaccaataaatgaaatccaccactcaccgtgtgtgtcccagctgccccatcttccccagcgcatactgttcctcttctcattactctccccgccgcctgtttcctcacttctcttcccctttccatgcgtccatgatccccacccatgtgtttaaaaggcatagcctttgcagggacctgtctgttcaaatgttgaacgtgcgctcccacattctgggtcaaaggattggta

SEQ ID NO: 8 - DNA, 1134 bp, Homo Sapiens
catttaaagaggagaattaactatgagaggtcgcatcaccatcaccatcacggatcctatttaggtgacactatagaatcgtcgacccacgcgtccgggcggaagtaccagtcaaagaagaagttgaatctcttcaagttaacacccttcatggtcaactccgtccttgctgaagggaagggtggattcataagagccaagcttgtgtgtaagactctagaaaacttctttgcctcggctgacgaagagctgaccattgatcacgtgcctatttggtgtaagaacagccaaggacagagagtcatggttgagcagagtgaaaaactgaatggtgtccttgaagcgagccgcctctgggataacatgcggaagctgggggagtgcacagaagaggcgcaccagatgactcatgacggctacttgaaactctggcagctgagcaagccttcgctggcctcttttgacgccatctttgtggatgaggcccaggactgcacaccagctatcatgaacatagttctgtctcagccatgtgggaaaatctttgtaggggacccgcaccagcagatctataccttccggggtgcggtcaacgccctgttcacagtgccccacacccacgtcttctatctcacgcagagttttcggtttggtgtggaaatagcttatgtgggagctactatcttggatgtttgcaagagagtcaggaaaaagactttggttggaggaaaccatcagagtggcattagaggtgacgcaaaggggcaagtggccttgttgtcccggaccaacgccaacgtgtttgatgaggccgtacgggtgacggaaggggaattcccttcaaggatacatttgattggggggattaaatcatttggattggacagaatcattgatatttggatccttcttcagccagaggaagaacggaggaaacaaaacctcgtcattaagacaaatttatcagagatgggtgcacaagaaggctttagtggcttcaggaggtatgtgaccgctgccgaggacaaggagcttgagcaagatcgcagttgtgaaagtataacatcagattccgagctggtgcaaaggataaaaaatgccaattagaagattggactttgcgaagaccatact

SEQ ID NO: 9 - DNA, 1233 bp, Homo Sapiens
aacttaaaggaaggaagaaattaactatgagaggtcgcatcaccatcaccatcacggatcctatttaggtgacactatagaatcgtcgacccacgcgtccgtgagtctcaagatggacaaccgggatgttgcaggaaaggctaaccggtggtttggggttgctccccctaaatctggaaaaatgaacatgaacatccttcaccaggaagagctcatcgctcagaagaaacgggaaattgaagccaaaatggaacagaaagccaagcagaatcaggtggccagccctcagcccccacatcctggcgaaatcacaaatgcacacaactcttcctgcatttccaacaagtttgccaacgatggtagcttcttgcagcagtttctgaagttgcagaaggcacagaccagcacagacgccccgaccagtgcgcccagcgcccctcccagcacacccacccccagcgctgggaagaggtccctgctcatcagcaggcggacaggcctggggctggccagcctgccgggccctgtgaagagctactcccacgccaagcagctgcccgtggcgcaccgcccgagtgtcttccagtcccctgacgaggacgaggaggaggactatgagcagtggctggagatcaaagtttcacccccagagggagccgagactcggaaagtgatagagaaattggcccgctttgtggcagaaggaggccccgagttagaaaaagtagctatggaggactacaaggataacccagcatttgcatttttgcacgataagaatagcagggaattcctctactacaggaagaaggtggctgagataagaaaggaagcacagaagtcgcaggcagcctctcagaaagtttcacccccagaggacgaagaggtcaagaaccttgcagaaaagttggccaggtttcatagcggacgggggtcccgaggtggaaaccattgccctccagaacaaccgtgaggacccaggcattcagctttctgtatgagcccatagccaaggttacagtactaccgacagagctggaggagttccggaagccaggcagctcacaagcagcttcacagcactgatccggcctgagccaagtcccctcctgaagcctgtcaggtcttactccagcacactgcccgtctcgtcagcctgccatatcatcttgttcactgctcgagctagcctgctaacactcgtaagatacgaaactcagtgtctctagtaat

SEQ ID NO: 10 - DNA, 1127 bp, Homo Sapiens
aactttaaggagggaggaattaactatgagaggtcgcatcaccatcaccatcacggatcctatttaggtgacactatagaatcgtcgacccacgcgtccgcccacgcgtccgccgctgggcagcagacagtggagatcgacctcatcaagcctggcctcttcaaaggtacctatggcagccacggcctggagattgtgatgctcagcttccacggccggcgtgccaggggcaccaagatcacgggcgaccccaacatccccgacctcgagaaccagcgcaacttcaatgagctctcccgcatcgtcctggaggtgcgcgagagggtgcgccaggagcagcaggaaggcgggcacgaggcgggcgagggtcgtggccggcagggcccccgggagtcccagccaagccctgcccagcccagggcagaggcgcccagcaagggcccagatgggacacctggtgaggatggtggcgagcctggggatgccgtagctgcggccgagcagcctgcccagtgtgggcaggggcagccgttcgtgctgcccgtgggcgtgagctccaggaatgaggactacccccgaacctgcaggatgtgtttttatggcacaggcctcatcgcgggccacggcttcaccagccctgaacgcacccccggggtcttcatcctcttcgatgaggaccgcttcgggttcgtctggctggagctgaaatccttcagcctgtacagccgggtccaggccaccttccggaacgcagatgcgccgtccccacaggccttcgatgagatgctcaagaacattcagtccctcacctcctgaccggccacatccttgccgccacatcccgggtggctctggggctctgaactctgacctgtgaatagaagcagcatgcactttggaaatccggccttttgaccagaacgcacacctcgtcggggggcccagtccagccaccccccagcactttatgtagagagtgtgacatagacctgcatatttgtcagtgccatgatggaagaagctgacatgtcttaccaaaaacagagagaatcgagtctggataagcaaatgtagggacagccgtgggacgctgaaaatttaaacggtgggttccgcactctgggcgt

SEQ ID NO: 11 - DNA, 1219 bp, Homo Sapiens
atctatagaaggagaattaactatgagaggtcgcatcaccatcaccatcacggatcctatttaggtgacactatagaatcgtcgacccacgcgtccgtgactacaaaggagtgtttacatcgtttttgtgcagactgcatcatcacagcccttagaagtggcaacaaagaatgtcctacctgtcggaaaaaactagtttccaaaagatcactaaggccagacccaaactttgatgcactcatcagcaaaatttatccaagtcgtgatgagtatgaagctcatcaagagagagtattagccaggatcaacaagcacaataatcagcaagcactcagtcacagcattgaggaaggactgaagatacaggccatgaacagactgcagcgaggcaagaaacaacagattgaaaatggtagtggagcagaagataatggtgacagttcacactgcagtaatgcatccacacatagcaatcaggaagcaggccctagtaacaaacggaccaaaacatctgatgattctgggctagagcttgataataacaatgcagcaatggcaattgatccagtaatggatggtgctagtgaaattgaattagtattcaggcctcatcccacacttatggaaaaagatgacagtgcacagacgagatacataaagacttctggtaacgccactgttgatcacttatccaagtatctggctgtgaggttagctttagaagaacttcgaagcaaaggtgaatcaaaccagatgaaccttgatacagccagtgagaagcagtataccatttatatagcaacagccagtggccagttcactgtattaaatggctctttttctttggaattggtcagtgagaaatactggaaagtgaacaaacccatggaactttattacgcacctacaaaggagcacaaatgagcctttaaaaaccaattctgagactgaactttttatagcctatttctttaatattaagatgtactggcattacttttatggacagatcttggatatgttgtcaattttcttttctgagcagactagtttacgctatcaatctttccctttattagatttcttttgagactgcatatcagtattttttcttcttaaaaaataatcctgagtctggttttttcccaaactggtccatggacacattgacaggattcagttcgattcttagatccattgcgccattcggctcctagat

SEQ ID NO: 12 - DNA, 1238 bp, Homo Sapiens
taatttaagaagggagaattaactatgagaggtcgcatcaccatcaccatcacggatcctatttaggtgacactatagaatcgtcgacccacgcgtccgcccacgcgtccgcccacgcgtccgtgagggttgaggctcacccaaagaacaacagggccataatacaaatcccgtccactgaaggtgaaggcagtggctcctgtcaagtggaaagcccctgaaaagggcacccttcgccaaacttactagctcaacgatctcaacagggactcagaaagctgagagtctctgaaagacagctttggttctggagatcccgagagaagcaacattgatagcaatgagcatcaccaccacggaattaccaccatccgcgtcaccccagtagagggcagcgaaattggctcatagacgctgtccatttcttcttcccgcgactccaccctgcggagaaagggcaatatcattctaatccctgaaagaagcaacagccccgaaaacactacaaatatcttctacaaaggaacctcccccacacgggcttataaggattgagtgatgtccattccatcattagggctactcgcaaaagaccatatgttgattctacctgtgttctgttccagcgaattgggaagtctcaccaagctagattgtctaccatcagcccagaactctgtaacttttcacaactgctatactcaaacttgcagatctcacatcaaggagagggaaaagcgcaatgcaagaacctaactaacgtgatgatatgaagagttttcataagacctgtcgtcgaacttaaaaggctttgcagaggggagtatcaaaataaagtgggtttcttcaatgtatactattttacttcctgatgtgccaacttttggggattttctttatagtgagctgtgggaacccagaacacacacgttttccctacagcagaggccatgcagtattatatattcattttgcagaatctgcacctacagctcaataccggtcgatgctgattattatagtactataccatgtaactctcaactctatttagctgtgaatagtgctgggacatcccttgtaatgaaatgcaaccttattaagaacaagctgctgcttttgttaaaatagacactcgcagcttacctgtatggaccttgtcacagtcaaatagaaaagatttttggacgatacttaccaatatctgcctcttgacaatcaacatagtgattcaaatc

SEQ ID NO: 13 - DNA, 851 bp, Homo Sapiens
ccctaaaaggaagggagaatttaactatgagaggtcgcatcaccatcaccatcacggatcctatttaggtgacactatagaatcgtcgacccacgcgtccgcacgcacattgtcggggatggcgtccaagactaccaccaccatcatccctaagcgaatcgcccacagtccatccttacagagtttaaagaaacccattatccccaaagagtttgggggcaaagtccccaccgtcatccgccagcgctatctcaacctgttcatcgaggagtgtctcaagttctgtacctccaaccaggaggccatagagaaggcactgaacgaggagaaggtggcctatgaccgcagccccagcaagaacatctacctgaatgtggccgtgaacaccctcaagaagctcaggggcctggcccccagcgctgtgcccggcctcagcaaaaccagtggccgcagggttgtgtcccacgaggtggtgttggggggcaggttggccgccaagaccagcttctcgctcagccgtccaagcagcccccgggtggaggacctgaaaggggctgccctgtacagccgcctcagggagtacctgctcacccaggaccagctcaaggagaacggctaccccttcccgcacccagagcggcccgggggcgcaatcatcttcacagctgaggagaagaggcccaaggactcttcctgcaggacctgctgccgctgtggcaccgagtacctcgtgtcctcttcaggccgctgcatccgggacgaggagtgtttataccactggggacggctgcgccggaaccgggtggccggaggctgggagacccagtacatgtgctgctccggctgccgcc

SEQ ID NO: 14 - DNA, 1134 bp, Homo Sapiens
ctcttttaagaaggagaaatttaactatgagaggtcgcatcaccatcaccatcacggatcctatttaggtgacactatagaatcgtcgacccacgcgtccggccgggtcgtaaaacttgaaaatggtgaaatagagaccattgcccggtttggttcgggcccttgcaaaacccgagatgatgagcctgtgtgtgggagacccctgggtatccgtgcagggcccaatgggactctctttgtggccgatgcatacaagggactatttgaagtaaatccctggaaacgtgaagtgaaactgctgctgtcctccgagacacccattgaggggaagaacatgtcctttgtgaatgatcttacagtcactcaggatgggaggaagatttatttcaccgattctagcagcaaatggcaaagacgagactacctgcttctggtgatggagggcacagatgacgggcgcctgctggagtatgatactgtgaccagggaagtaaaagttttattggaccagctgcggttcccgaatggagtccagctgtctcctgcagaagactttgtcctggtggcagaaacaaccatggccaggatacgaagagtctacgtttctggcctgatgaagggcggggctgatctgtttgtggagaacatgcctggatttccagacaacatccggcccagcagctctggggggtactgggtgggcatgtcgaccatccgccctaaccctgggttttccatgctggatttcttatctgagagaccctggattaaaaggatgatttttaagctctttagtcaagagacggtgatgaagtttgtgccgcggtacagcctcgtcctagaactcagcgacagcggtgccttccggagaagcctgcatgatcccgatgggctggtggccacctacatcagcgaggtgcacgaacacgatgggcacctgtacctgggctctttcaaggtcccctttcttctgcagactcagccttcaggctgtttagcctccagatagctgcccctgccacgcaggccagagtcttccactcaggcaccagctggttcagggaggagctgtgaccagcctgttcaagtgtcaccatgcacctgatagtccctgaaaggtgggggaagctgcat

SEQ ID NO: 15 - DNA, 895 bp, Homo Sapiens
tactttataagggagaatttaactatgagaggtcgcatcaccatcaccatcacggatcctatttaggtgacactatagaatcgtcgacccacgcgtccgctggaaagggcccccaaggccctggaggaggaggcattaatgtccaagagatcctcacctccatcatgggtagcccaaacagtcatccttcagaggaactactgaaacaaccagactattcggacaagatcaagcagatgctggtgccacatggactcctaggccctggcccaatagccaatggtttcccaccagggggtcctgggggccccaagggcatgcagcactttccccctggacctgggggacctatgccaggtccccatggaggccctggtgggccagtgggtccacgtcttctgggtcctccaccccctccccggggaggtgatcccttctgggatggcccgggcgaccctatgcggggtggcccaatgcgggggggaaccagcatccatgaggccatggagcaacaaagcatctccatctcaaaggctggcatcgtcacctccctgcaggctcgctgcacggtcattgctgccgccaaccccataggagggcgctacgacccctcgctgactttctctgagaacgtggacctcacagagcccatcatctcacgctttgacatcctgtgtgtggtgagggacaccgtggacccagtccaggacgagatgctggcccgcttcgtggtgggcagccacgttcagacaccaccccagcaacaaggaggaggaggggctggccatgggatcgctgctgaacccgccatgcccaacacgtatggggtgggagcccctgcccaagaggtcctgaaaaatacatcttctactctaaggataagggtccaccccga

SEQ ID NO: 16 - DNA, 977 bp, Homo Sapiens
accttaaggaaggagaaattaactatgagaggtcgcatcaccatcaccatcacggatcctatttaggtgacactatagaatcgtcgacccacgcgtccgggaagtcccgtaacggagacgctggtcaggacgttcccacctcctctgacactgccgagtccgatcggagaggggtcaccgcctccttcagcgaggaggaggggggcggagcccgactcaggatcatggattttcctggtcactttgaacaaatcttccagcagctgaactaccagagacttcatggccagctctgtgattgtgtcattgtagtggggaatagacactttaaagcccaccgctccgtgctggcagcatgcagcacgcatttccgagccctgttctcagtggcagaaggagatcagaccatgaacatgatccagctggatagcgaggtggtgacagcagaggcctttgctgcactgattgacatgatgtatacctccaccctcatgctgggggagagcaatgtaatggatgtcttattggcagcctctcacctgcatttgaactctgttgttaaggcatgtaaacattacttaacgacaaggacgctgcccatgtctccccccagtgagcgcgttcaggagcagagcgcccgcatgcagcgctcctttatgctacagcagctgggactaagcatcgtgagctcagccctcaattccagccagaatggcgaggagcagccagcccccatgagctcttccatgcgcagtaacctggatcagcgcacgcccttccccatgagacgccttcataagcgcaagcagtctgcagaggagcgggccaggcagcgcctccgaccctccatagatgagtctgccatttcagatgttacaccggagaatgggccttcaggggttcattctcgggaggagttctttcacagattcctctgaaaattgtggataatcctaaagctgacggaatgacttgat

SEQ ID NO: 17 - DNA, 513 bp, Homo Sapiens
atgagaggatcgcatcaccatcaccatcacggatcctatttaggtgacactatagaatcgtcgacccacgcgtccgcaggcgccgccgggacgggcacgggcgcgcgggctccggcgggcgccggctgccttcctccgtcgctcgctgtctctcccggccgcattctcctccgctgcggggccgagctctccccagcgctcgcaggaaggaagaagggagccgaggacgccgagaagttcccgcggcagccgcggatcccggccaaggcggaggctgcggctccgacggggcaggagcgcgatccacggcgaggggcgtacggccaaagggtccgcggcgtggagcgctcggaccttccgctctcccccgggcgtgggccgggaccccatgagacgcgcccacgaggggcgcgagattcctagcttgggcggcgctaggcggagggaggtgttgcagccgccggagccagagagctgccggcaggaggcggcggcggcaagaacttgaacttg

SEQ ID NO: 18 - DNA, 1123 bp, Homo Sapiens
caattataggaggagaattaactatgagaggtcgcatcaccatcaccatcacggatcctatttaggtgacactatagaatcgtcgacccacgcgtccgctgaggcgtggcgtctgctggggcacctgaaggagacttgggggcacccgcgtcgtgcctcctgggttgtgaggagtcgccgctgccgccactgcctgtgcttcatgaggaagatgctcgccgccgtctcccgcgtgctgtctggcgcttctcagaagccggcaagcagagtgctggtagcatcccgtaattttgcaaatgatgctacatttgaaattaagaaatgtgaccttcaccggctggaagaaggccctcctgtcacaacagtgctcaccagggaggatgggctcaaatactacaggatgatgcagactgtacgccgaatggagttgaaagcagatcagctgtataaacagaaaattattcgtggtttctgtcacttgtgtgatggtcaggaagcttgctgtgtgggcctggaggccggcatcaaccccacagaccatctcatcacagcctaccgggctcacggctttactttcacccggggcctttccgtccgagaaattctcgcagagcttacaggacgaaaaggaggttgtgctaaagggaaaggaggatcgatgcacatgtatgccaagaacttctacgggggcaatggcatcgtgggagcgcagggccagatattcgaagcttacaacatggcagctttgtggaaattaccttgtattttcatctgtgagaataatcgctatggaatgggaacgtctgttgagagagcggcagccagcactgattactacaagagaggcgatttcattcctgggctgagagtggatggaatggatatcctgtgcgtccgagaggcaacaagtttgctgctgcctattgtagatctgggaggggcccatcctgatggagctgcagacttaccgttacacgacacagtatgagtgacctgagtcagttaccgtacaccgagaagaattcagtagtagaagtaagagtgaacctaatatgcttctcacgaaatgatggtgaccgcatcttgccagtgtgtagaacaaaggaatatatgtgcacggagg

SEQ ID NO: 19 - DNA, 482 bp, Homo Sapiens
atttttaaagaagagaattaactatgagaggtcgcatcaccatcaccatcacggatcctatttaggtgacactatagaatcgtcgacccacgcgtccgcctggatgagcaggagctggaggcactcttcaccaaggagctggagaaagtgtacgacccaaagaatgaggaggacgacatgcgggagatggaggaggagcgactgcgcatgcgggagcatgtgatgaagaatgtggacaccaaccaggaccgcctcgtgaccctggaggagttcctcgcatccactcagaggaaggagtttggggacaccggggagggctgggagacagtggagatgcaccctgcctacaccgaggaagagctgaggcgctttgaagaggagctggctgcccgggaggcagagctgaatgccaaggcccagcgcctcagccaggagacagaggctctagggcggtcccagggccgcctggaggcccataagat

SEQ ID NO: 20 - DNA, 913 bp, Homo Sapiens
ccttttaagagggagaattaactatgagaggtcgcatcaccatcaccatcacggatcctatttaggtgacactatagaatcgtcgacccacgcgtccggcgccggctccagggccatgaagcccccaggaggagaatcgagcaatctttttggaagtccagaagaagctactccttccagcaggcctaataggatggcatctaatatttttggaccaacagaagaacctcagaacatacccaagaggacaaatcccccagggggtaaaggaagtggtatctttgacgaatcaacccccgtgcagactcgacagcacctgaacccacctggagggaagaccagcgacatttttgggtctccggtcactgccacttcacgcttggcacacccaaacaaacccaaggatcatgttttcttatgtgaaggagaagaaccaaaatcggatcttaaagctgcaaggagcatcccggctggagcagagccaggtgagaaaggcagcgccagaaaagcaggccccgccaaggagcaggagcccatgcccacagtcgacagccatgagccccggctggggccgcggcctcgctctcacaacaaggtcctgaacccaccgggaggcaaatccagcatctccttctactaagagaagccactgctccacccggagccagaccagaaactcaagagatagggtagccatgttttcatttccttttgcccaaatgagcggggtgggaagagggttagtcttatgtgagcctggctgctcagcgtctcctggccgtcatgacagctgcttggagacccgtgccttccagatggctgggagatgcctctgtggggatgaaatggggcacccctggccatcactcatgtgtagtccaggtttgagaggaactggaaggggggtgagggt

SEQ ID NO: 21 - DNA, 1126 bp, Homo Sapiens
tttttaagagggagaaattaactatgagaggtcgcatcaccatcaccatcacggatcctatttaggtgacactatagaatcgtcgacccacgcgtccgcccacgcgtccgcccacgcgtccgcccacgcgtccgcccacgcgtccgggcgccgcgggaccatggcggcggcggcggacgagcggagtccagaggacggagaagacgaggaagaggaggagcagttggttctggtggaattatcaggaattattgattcagacttcctctcaaaatgtgaaaataaatgcaaggttttgggcattgacactgagaggcccattctgcaagtggacagctgtgtctttgctggggagtatgaagacactctagggacctgtgttatatttgaagaaaatgttgaacatgctgatacagaaggcaataataaaacagtgctaaaatataaatgccatacaatgaagaagctcagcatgacaagaactctcctgacagagaagaaggaaggagaagaaaacataggtggggtggaatggctgcaaataaaggataatgatttctcctatcgacccaacatgatttgtaactttctacatgaaaatgaagacgaagaagtggtagcttcagccccagataaatctttggaattggaagaggaagagattcaaatgaacgacagttcaaacctgagttgtgaacaggagaaaccaatgcacttggaaatagaagattctggtcctcttattgatataccttctgagacagaaggttctgtttttatggaaactcaaatgctgccttagaaatcactcctagatgaaatgtttctcataataacttgtcaagaactttttagagttgttacataaaaataattgctgtgtaaaaaaaaaaaaaaaaaaacaaaatacaggaagtcgcgtcctatatggacgactgagctaattggcgggccgcgccctcatggtgagtcgattagcctggttgctgactctgaactcgatgtgaaaaaacccataatggacctgcgaactcctcctgtaatatagacgagacgatccgttgcagcagcgtggtttattggggaaaactcagtgtgacatgggaatatttgtgggcaaaggaga

SEQ ID NO: 22 - DNA, 1226 bp, Homo Sapiens
ccctaaaggaaggagaaattaactatgagaggtcgcatcaccatcaccatcacggatcctatttaggtgacactatagaatcgtcgacccacgcgtccgcaaatatggaaactcgttactttgcaaagaagaaaacccttcttggcttgagtaaattggctgcattagcttcagacttttcagaggatatgctacaagaaaaaattgaagaaatggctgagcaggagcgctttctactgcatcaggagaccctacctgaacagctgctggcggagaaacagctaaatctcagtgcgatgccagtattgactgcaccacaactcattggtctatatatctgtgaagaaaatagaagagctaatgaatatgatttcaagaaagctttggacttgttggaatatattgatgaggaagaagatataaatataaatgatctaaaactggaaatcctttgcaaagctcttcagagagataactggtccagttctgatggcaaagatgatccaattgaagtatctaaagacagtatatttgtgaagatcttacagaaacttttaaaagatggcattcagctcagtgagtacttaccggaggtgaaagacctgctacaagcggatcagcttggaagcttaaagtccaatccttacttcgagtttgttttgaaagcaaattatgaatattatgttcagggacaaatataactttttctaaaaatggccattgtttatgaaatctgtataagtgtgtccttatacaaattttaggccataaacaagtgtaagtttgtacaatttcataacatgtatagctgagtttttatactttatatgtaggaagctaatataaaatagttatgtaactgtgattttggttttcagttatgtgacttgttttttccacctgaaatgtgtcagttgttgttcctgtactcggtgccctttctttttactctcacgtggtcccaggttctggagttcttgtcctggttctagctgctcacatgtacaaatcacttctaggcctcagtttctgcgactatgaaaaccaaaaggagagtgggcctaactcatgtgagcttgaatactgatgactcattggggagcattttaacttttctaacttaataataaatgagcactattgaaagtaaaaaaaaaaacaaaagggcggcgctccctataggatcgattagctaatactgagcctggaactctggttgaatgatc

SEQ ID NO: 23 - DNA, 1224 bp, Homo Sapiens
cacttttaagaaggaaaatttaactatgagaggtcgcatcaccatcaccatcacggatcctatttaggtgacactatagaatcgtcgacccacgcgtccgctaagatggcggcgacggccaggcggggctggggagctgcggctgttgccgccgggctgcgcaggcggttctgtcatatgttgaagaatccatacaccattaagaaacagcctctgcatcagtttgtacaaagaccacttttcccactacctgcagccttttatcacccagtgagatacatgtttattcaaacacaagataccccaaatccaaacagcttaaagtttataccaggaaaaccagttcttgagacaaggaccatggattttcccaccccagctgcagcatttcgctcccctctggctaggcagttatttaggattgaaggagtaaaaagtgtcttctttggaccagatttcatcactgtcacaaaggaaaatgaagaattagactggaatttactgaaaccagatatttatgcaacaatcatggacttctttgcatctggcttacccctggttactgaggaaacaccttcaggagaagcaggatctgaagaagatgatgaagttgtggcaatgattaaggaattgttagatactagaatacggccaactgtgcaggaagatggaggggatgtaatctacaaaggctttgaagatggcattgtacagctgaaactccagggttcttgtaccagctgccctagttcaatcattactctgaaaaatggaattcagaacatgctgcagttttatattccggaggtagaaggcgtagaacaggttatggatgatgaatcagatgaaaaagaagcaaactcaccttaaaataatctggattttctttgggcataacagtcagacttgttgataatatatatcaagttttttattattaatatgctgaggaacttgaagattaataaaattatgctcttcagaaaaaaaaaaaaaaaaaaaagggcggccgctcccttatagtgagtcgtattaagcttaattagctgagcttgaactcctgtgaaagatcagtaatgacttcaaactccatttgattgtcagacgctcgttgcgcgggcgtttttatgcggaaatcaaccagctgcgaagtttctagaactaagaatgctatatgtaaaaatcttgaatatacacgtgttaattccaatgttctgagacgac

SEQ ID NO: 24 - DNA, 1227 bp, Homo Sapiens
tcctttaaagaggagaaattaactatgagaggtcgcatcaccatcaccatcacggatcctatttaggtgacactactagaatcgtcgacccacgcgtccggtcaaatcctggaaacagtctacaaacacagctgtggggggttgcctcctgttcgaagtgcactggaaaaaatcctggccgtttgtcatggggtcatgtataaacagctctcagcctggatgctccatggactcctcttggaccagcatgaagaattctttatcaaacaggggccatcttctggtaatgtcagtgcccagccagaagaggacgaggaggacctgggcattgggggactgacaggaaaacaactgagagaactgcaggacttgcgcctgattgaggaagagaacatgctggcaccatctctgaagcagttttccctacgagtggagattttgccatcctacattccagtgagggttgctgaaaaaatcctatttgttggagaatctgtccagatgtttgagaatcaaaatgtgaacctgactagaaaaggatccattttgaaaaaccaggaagacacttttgctgcagagctgcaccgtctcaagcagcagccactcttcagcttggtggactttgaacaggtggtggatcgcattcgcagcactgtggctgagcatctctggaagttgatggtagaagaatccgatttactgggtcagctgaagatcattaaagacttttaccttctgggacgtggagaactgtttcaggccttcattgacacagctcaacacatgttgaaaacaccacccactgcagtaactgagcatgatgtgaatgtggcctttcaacagtcagcacacaaggtattgctagatgatgacaaccttctccctctgttgcacttgacaatcgagtatcacggaaaggagcacaaagatgctactcaggcaagagaagggccttctcgggaaacttctccccgggaagccctgcatctggctgggcagccctaggtctttcctacaaggtacagtggccactacatattctcttcaccccagcttgtcctgaaaagtacatgtttgttttaagtacttactgaatgtgggcccggtgcaagctgagctgcagcactgctgggcctacaatgcaggccagacacttcagtcgaccggactgatgcatcaatttcgctaagaatatcactatgccatttttgggtggaataatcttca

SEQ ID NO: 25 - DNA, 1012 bp, Homo Sapiens
tacttaagaggagattaactatgagaggtcgcatcaccatcaccatcacggatcctatttaggtgacactatagaatcgtcgacccacgcgtccgatgtcttcaagctgggcttacaggatggaaaagaatatttattccaggccaaggatgaggcagagatgagctcgtggctacgggtggtgaatgcagccattgccacagcgtcttctgcctctggagagcctgaagagccggtggtgcccagcaccacccggggcatgacccgggccatgaccatgcccccagtgtcacccgtcggggctgaggggcctgttgtgctccgcagcaaagacggcagagaacgagagcgagaaaaacgcttcagcttctttaagaagaacaagtagttgggggcaaggtcccaggccaactccctccctccgttcaggaaactgccagggacagtcgacagggaccgccctcttgtcaggacaactgcctgctgctagggtctgttgccaaggtcaacccatcaccaggaactgtcactggggacgagtccatgttcccaagggcagcccttctcttctgctgtttaattccagactggtggtgggacccaggtaaccccctctcccacccccgccgacttctcccctttccccagcctcgtgcctctgtccctcaccacggtgtggacagtgccgcaccctcaacataggccatgtggggagtggctgcccctgcctcagggtcattctcctgccatgcgagggcactcgccttctgccttctggttcctcacccctcagaccagccaggaacctctcagagctgaagcaggccctgggggcagaagtgccagatgacagtcagaggcgcaggagccctccctccccacccccaccctgtaactccagctgccactccatctccagctgctctcaatggcttcaaggtgtgttgttccggggacagccaccgccttgagtctggccaaggaggtgattaaacagcctcagctttctcta

SEQ ID NO: 26 - DNA, 682 bp, Homo Sapiens
accgggggtgccggggccttttagaggagaattactatgaaggtcgcatcaccatcaccatcacggatcctatttaggtgacactatagaatcgtcgacccacgcgtccgaggacacagagatgatcctagtggacaggaccctcacagacatctcctttcagagcaatgtgctcttcgctgaggcggggccagactttgaactgcggttagagctgtatggggcctgtgtggaagaagagggggccctgactggcggccccaagaggcttgccaccaaactcagcagctccctgggccgctcctcagggaggcgtgtccgggcatcgctggacagtgctgggggttcagggagcagtcccatcttgctccccaccccagttgttggtggtcctcgttaccacctcttggctcacaccacactcaccctggcagcagtgcaagatggattccgcacacatgacctcacccttgccagtcatgaggagaaccctgcctggctgcccctttatggtagcgtgtgttgccgtctggcagctcagcctctctgcatgactcagcccactgcaagtggtaccctcagggtgcagcaagctggggagatgcaaaactgggcacaagtgcatggagttctgaaaggcacaaacctcttctgttaccggcaacctgaggatgcatacact

SEQ ID NO: 27 - DNA, 1198 bp, Homo Sapiens
ttctttaagaaggagaattaactatgagaggtcgcatcaccatcaccatcacggatcctatttaggtgacactatagaatcgtcgacccacgcgtccgcccacgcgtccgcccacgcgtccggtgatattcagtcatctgattttcctgagcctccagacgccctagaagcagacactttcccagatgaaattcatcaccctaagatgactgtggagccatcatttaatgatgctcatgtatccaaattcagtgaccaaaatagcacagaactgatgaatagtgttatggtcagaacagaagaagaaatctctgacaccgaccttaaacaagaggaatcaccctctgatttagccagtgcttatgttactgagggtttagagtctcccactatagaagaacaagttgatcaaacaattgatgatgaaacaatacttatcgttccttcaccacatggctttatccaggcatctgatgttatagatactgaatctgtcttgcctttgacaacactaacagatcccatactccaacatcatcaggaagaatcaaatatcattggatcatccttgggcagtcctgtttcagaagattcaaaggatgtcgaagatttggtaaactgtcattagaataattcttagaaataggcagttcaagcaaagaaggcacactgttaattacaacctcttcaaagaaataggagcaacccccaagaggcttaatttaccaatttaaatagccacagtccttaagccacacacattgttgctgctatgactttttacctcccttaaacacatcatctgaggttgagttttatgacagtatgtagttgagtggaggctgggagttttaagcataaatccctgtttagtgttacatgggaataaggaatttcattcacttcagccactaagaaaagtttagaatcacgaaagcttaactgctgtggtttaaagtacagtttctctaaagatcagacatggcactgtctcctctcaagcctggtgtagttcagatgagtcttttcaacatggtctcaacatggtctagagcttagcagtgatctctgatctcagagactaagtttgagactgacagcatacagtatagagacctaggaggtgtctgtggtggtacattggtaacccattgctggcagtggaactgattagcgcgggtcaaccaggatagccata

SEQ ID NO: 28 - DNA, 1023 bp, Homo Sapiens
aaaatttaagaagggagaaattaactatgagaggtcgcatcaccatcaccatcacggatcctatttaggtgacactatagaatcgtcgacccacgcgtccgacattgctgacgtgagttactttgttccggagggatctgatctggataaagtggctgccgagagggctacaagcgtctacttggttcaaaaggtggtccccatgcttcccaggctgctgtgtgaggagctgtgcagcctcaaccccatgtccgacaagctgaccttctctgtgatctggacactgactccagagggcaagatccttgatgaatggtttggccggaccatcatccgctcctgcaccaaacttagctacgagcatgcacagagcatgattgaaagcccaactgagaaaatccctgcgaaagagctgccccccatttccccagagcatagcagcgaggaggtacaccaggccgtcttgaatctccacggaattgccaagcagttacgccagcagcgctttgtggacggcgcacttcgtttggatcagctaaagcttgctttcactctggaccacgagaccggattgcctcaaggatgtcatatctatgagtaccgcgagagcaacaagctcgtggaggagttcatgctcttggccaacatggcagtggcccacaagatccaccgcgccttccccgagcaggccctgctgcgccggcaccccccgccccaaaacaaggatgctcagtgacctggtggaattctgcgaccagatggggctgcccgtggacttcagctccgcaggagccctcaataaaagcctgacccaaacatttggagatgacaagtacttcactggcccgcaaagaggtgctcaacaacatgtgctcccggcccatgcagatggcactgtacttctgctcggggctgctgcaggacccacgcaatttccggcactacgcgctcaatgtgccccttgtaaacacactttcactcgcccatccgccgctttgccgaacgtcttgggtgaccgcctcc

SEQ ID NO: 29 - DNA, 862 bp, Homo Sapiens
tattaaagaggaagaattaactatgagaggtcgcatcaccatcaccatcacggatcctatttaggtgacactatagaatcgtcgacccacgcgtccgcgctggacgggggtgaccgggatcgggacagggacagagatagggacagggacaggtcatccaagaaggcccggccccccaaggagtcggcgccttcctcagggcccccgccaaagccaccagtcagcagcggctcaggctcttcatcctcgtcgtcctcctgttcttcccggaaggtgaagctgcagtccaaggtggcggtgctgatccgcgagggtgtcagcagcaccaccccggccaaggatgccgcgtcagccggcctgggctccattggcgtcaaattcagccgtgaccgcgagagtcgctcccccttcctcaaacctgacgagcgggcccccactgagatggccaaagcagctccgggcagcaccaagcccaaaaagaccaaggtcaaggccaaggcaggggccaagaaaaccaaggggaccaagggaaagaccaagccatccaagaccaggaaaaaggtccgcagtggaggtggcagcgggggcagtggtggccaggtgtcgctgaagaagtccaaggcggatagctgcagccaggcggcaggcaccaagggggcggaggagacttcctggtccggggaggagcgggcagccaaggttcctagcaccccgccccccaaggcagccccaccaccccctgccctcactccggactcgcagaccgtggacagcagctgcaagacacctgaggtctccttcctgcccgaggaggccactgaggaggctggggtccgaggtgggcggaggaggaggaggaaga

SEQ ID NO: 30 - DNA, 1190 bp, Homo Sapiens
atccaaaagaggagaattaactatgagaggtcgcatcaccatcaccatcacggatcctatttaggtgacactatagaatcgtcgacccacgcgtccgcccacgcgtccggacaccagggcgtcatggtgggcatgggccagaaggactcctacgtgggcgacgaggcccagagcaagcgtggcatcctgaccctgaagtaccccattgagcatggcatcgtcaccaactgggacgacatggagaagatctggcaccacaccttctacaacgagctgcgcgtggccccggaggagcacccagtgctgctgaccgaggcccccctgaaccccaaggccaacagagagaagatgactcagattatgtttgagaccttcaacaccccggccatgtacgtggccatccaggccgtgctgtccctctacgcctctgggcgcaccactggcattgtcatggactctggagacggggtcacccacacggtgcccatctacgagggctacgccctcccccacgccatcctgcgtctggacctggctggccgggacctgaccgactacctcatgaagatcctcactgagcgaggctacagcttcaccaccacggccgagcgggaaatcgtgcgcgacatcaaggagaagctgtgctacgtcgccctggacttcgagcaggagatggccaccgccgcatcctcctcttctctggagaagagctacgagctgcccgatggccaggtcatcaccattggcaatgagcggttccggtgtccggaggcgctgttccagccttccttcctgggtatggaatcttgcggcatccacgagaccaccttcaactccatcatgaagtgtgacgtggacatccgcaaagacctgtacgccaacacggtgctgtcgggcggcaccaccatgtatccgggcattgccgacaggatgcagaaggagatcaccgccctgcgcccagcaccatgagatcaagatcatcgcacccccagagcgcaagtactcggtggtgatcgtggctcatctggcctccactgtccacctttccagcagatgtggattagcaagcaggagtacgacgagtcgggccctcaatcgttcactcgctatgcttctaacgactcagcagatgcgtagcatttgctgcatgattattgagaaataaacttaccctctgcaatgccacactc

SEQ ID NO: 31 - DNA, 726 bp, Homo Sapiens
aatattaagaaggagaattaactatgagaggtcgcatcaccatcaccatcacggatcctatttaggtgacactatagaatcgtcgacccacgcgtccgcggacgcgtgggcggacgcgtgggcggacgcgtggggccgccatacgcgctctccctgtttagttatggcagagaacgatgtggacaatgagctcttggactatgaagatgatgaggtggagacagcagctgggggagatggggctgaggcccctgccaagaaggatgtcaagggctcctatgtctccatccacagctctggctttcgtgacttcctgctcaagccagagttgctccgggccattgtcgactgtggctttgagcatccgtcagaagtccagcatgagtgcatccctcaggccattctgggaatggatgtcctgtgccaggccaagtcgggcatgggaaagacagcagtgtttgtcttggccacactgcaacagctggagccagttactgggcaggtgtctgtgctggtgatgtgtcacactcgggagttggcttttcagatcagcaaggaatatgagcgcttctctaaatacatgcccaatgtcaaggttgctgttttttttggtggtctgtctatcaagaaggatgaagaggtgctgaaaaaaatctgcccgcatatcgtcgtggggactccaggccgtatcctagcccctggctcgaaataagagcctcaaccctc

SEQ ID NO: 32 - DNA, 887 bp, Homo Sapiens
tttttttaaagaaggaaaattaactatgagaggatcgcatcaccatcaccatcacggatcctatttaggtgacactatagaatcgtcgacccacgcgtccgcagagggcatcttcagggtccctggggacattgacgaggtgaatgccctgaagctgcaggtggaccagtggaaggtgcccacaggcctggaagacccccacgtccctgcgtccctgctgaagctgtggtaccgggagctggaggagcccctgatcccgcacgagttctacgagcagtgcatcgcgcactacgatagccccgaggcggcggtggccgtggtgcacgcgctgccccgcatcaaccgcatggtgctgtgctacctcatccgcttcctgcaggtcttcgtgcagccggccaacgtcgcggtcaccaagatggatgtcagcaacctggccatggtgatggcgcccaactgcttgcgctgccagtccgacgacccacgcgtcatcttcgagaacacccgcaaggagatgtccttcctgcgggtgctcatccagcacctggacaccagcttcatggagggtgtgctgtagcgggggcgcccggggacaggagggatgtcctgccgcccccagccaggccgaactccgcactcgctctcccggcagaggggccagaatcgcccggcccagccctggagccccctccactcccccaggcccctggccccggcgctccccacgtcttctgcctggtctgagggtgcagccagggcacagcagcggcggggagggcgcctctggcccccacctcagggcagttcccgcgggcaccgcctcgccctccgttggccgcgggtcacctccgaaaaaatgccttctgtgtctgtatccaacgactctgcct

SEQ ID NO: 33 - DNA, 1237 bp, Homo Sapiens
tttttaaagaagaagaattaactatgagaggatcgcatcaccatcaccatcacggatcctatttaggtgacactatagaatcgtcgacccacgcgtccgtgtcggatggacttggggctagctgcggcggggctggaggaggccagataaccatgtcagccacagttgtagatgcagttaatgctgcacccctatcggggtccaaagaaatgagtttggaagaaccaaagaagatgaccagagaggactggagaaagaagaaggagctagaagaacagcgaaaattgggcaatgctcctgcagaagttgatgaagaaggaaaagacatcaacccccatattcctcagtatatttcttcagtgccatggtatattgatccttcaaaaagacctactttaaaacaccagagaccacaaccagaaaaacaaaagcagttcagctcatctggagaatggtacaagaggggtgtaaaagagaattccataattactaagtaccgcaaaggagcatgtgaaaattgtggggccatgacacacaaaaagaaagactgctttgagagacctaggcgagttggagccaaatttacaggtactaatatagctccagatgaacatgtccagcctcaactgatgtttgactatgatgggaagagggatcggtggaatggctacaatccagaagaacacatgaaaattgttgaagagtatgccaaagttgatttggcaaaacgaacattgaaagcccagaaactccaagaggaattagcctcaggaaaattagtggaacaggctaattctccaaaacaccagtggggagaagaggaaccaaattctcagatggaaaaagatcataatagtgaagatgaggatgaagataaatatgcagatgatattgacatgcctggacagaattttgactccagagacgaattactgtccggaatctcaggattcgagagatattgcaaaatatttgaggaatttagatccaaattctgcctactatgatccaaaaactagagcatgagagagaatccttatgccaatgcagaagattcagatgatgagttatgctggaatatactttgtagtaccagaaatacattcattgctcaaccaggttgtttgcatgtagctatgcaagggatctgaatgtcatctcagccgatctacagctaggctgtgtgttagtctcaagtctaaagatccagactctaagaagtcttgtaagttgggtc

SEQ ID NO: 34 - DNA, 1211 bp, Homo Sapiens
aacttttaggaggagaattaactatgagaggatcgcatcaccatcaccatcacggatcctatttaggtgacactatagaatcgtcgacccacgcgtccggcagagaaggctttgtgggaaatcgctgtgaccagtgtgaagaaaactatttctacaatcggtcttggcctggctgccaggaatgtccagcttgttaccggctggtaaaggataaggttgctgatcatagagtgaagctccaggaattagagagtctcatagcaaaccttggaactggggatgagatggtgacagatcaagccttcgaggatagactaaaggaagcagagagggaagttatggacctccttcgtgaggcccaggatgtcaaagatgttgaccagaatttgatggatcgcctacagagagtgaataacactctgtccagccaaattagccgtttacagaatatccagaataccattgaagagactggaaacttggctgaacaagcgcgtgcccatgtagagaacacagagcggttgattgaaatcgcatccagagaacttgagaaagcaaaagtcgctgctgccaatgtgtcagtcactcagccagaatctacaggggacccaaacaacatgactcttttggcagaagaggctcgaaagcttgctgaacgtcataaacaggaagctgatgacattgttcgagtggcaaagacagccaatgatacgtcaactgaggcatacaacctgcttctgaggacactggcaggagaaaatcaaacagcatttgagattgaagagcttaataggaagtatgaacaagcgaagaacatctcacaggatctggaaaaacaagctgcccgagtacatgaggaggccaaaagggccggtgacaagctgtggagatctatgccagcgtggctcagctgagccctttggactctgagacactggagaatgaagcaaataacataaagatggaagctgagaatctggaacaactgattgaccagaaattaaaagattatggaggacctcagagaagatattgagaggaaggaacttgaagtcagaccttctggagaaagcaggactgacagcagaccgcagacaactctagccgagctgatgctgccagtcctcgctgagagctgcagaagggacgggatccttccaagaagctaatgacttctcaacactgaagattttgattagcgcgcgggatcg

SEQ ID NO: 35 - DNA, 1104 bp, Homo Sapiens
tctttaggaaggaggaattaactatgagaggtcgcatcaccatcaccatcacggatcctatttaggtgacactatagaatcgtcgacccacgcgtccgcccacgcgtccgcagccatggagcaggcacctccggaccccgagcggcagctccagccggcgcccttggagccgctgggctccccagacgctgggctgggggctgcggtcggcaaggaagcggagggggccggagaagagagctctggggtcgacacgatgacacacaataatttttggttgaagaagatagaaatcagtgtttcagaagcagaaaaacgaactggaagaaatgccatgaacatgcaagaaacatatactgcttacctcattgaaacaaggtcagttgaacataccgatggtcagagtgtcctaacagactcactatggcggcgatatagtgaatttgagttgttgagaagctaccttttagtttactatccacatattgttgtgccacctctgccagaaaaacgggcagaatttgtttggcataaactctctgctgacaacatggatccagattttgtggagaggcgacggattggtttagaaaactttctcttgaggattgcttcacatcccatcctttgtagagacaaaatcttctatctgtttttaacacaggaaggtaactggaaggagactgtgaatgaaactgggtttcagctgaaggcagactccaggttaaaagcgcttaatgcaacattcagagtgaaaaacccagacaagagatttactgaccttaagcactatagtgatgaactgcagtctgtcatctcacatcttcttcgagtcagagctagagtagcagatcgactctatggtgtatataaagtacatgggaattatggtcgagttttcagtgaatggagtgccatagaaaaagaaatgggtgatgggactgcagagtgctggtcatcatatgggatgtgtatgcatcttcctattgatgatattttggaagatgaagaacattattgcagatcagttaaagagtatcttttttatgcagaagcattgcgggctgtgtgcagggaacatgaccttatgcggtatgacttgag

SEQ ID NO: 36 - DNA, 1093 bp, Homo Sapiens
ctttataggagggaaaattaactatgagaggtcgcatcaccatcaccatcacggatcctatttaggtgacactatagaatcgtcgacccacgcgtccgctgccttgtccggcctcgcctgccctggctgcttcatagggggcaatgctccccttcttgacttcaaggctcgggggacttaaaatgaagattatgaaattggggagagattgaattcagaatcaatgaaaaggttttaaaaagatttggattttaaaaccacactgcacatcccctaccccgagggcgccatgcatggatctgatttggactttagcgattctctctttgtccccgccggctttagtggccgaactttaagtggttgaaatacatcctttacgaagagagatagactgcattcgaagttttcaggaaaactgtgatcactcaatggtccagagatccccctgagattcaagtcatcttgcctgatttcatccgataggccgccttcccccgcattggcctgccctttggattaggtttcatggtccgggggaaaatccctacccttggcagtaagccagtaaacatgacacaacccggctgtgacgaggtggcctaccctcgatttggctatgacatgaacacaccccattgacccctgcactactatgacacctatcacatggtgatcatcaaagagtcctggacgcgaatatccagcgagagagtcagtttctgcgcaagctggtgaaagatcgcatcatcactggtctccttctcgacatctgagtgcgcccttcacatgaccatagagagcaagtcatgcctgaacagcacccccgccacctacaaggagtcttcatgccagagaaatctgtgccaaggccccatgagcagaagggcttggtggagcaccagagctgtgcctgctcagacccagtctcagagacacactcaactcatcaacatgggtcctgatgcctaggtcacccggctcctggctgtgccatcagcccagcatgcatgtgctgggacactgggcatcaagactgctgccggagtccgtctgcagtcagtgtctgtgattatcacttgagtactttgcc

SEQ ID NO: 37 - DNA, 1052 bp, Homo Sapiens
ctttttaagaagggagaaattaactatgagaggtcgcatcaccatcaccatcacggatcctatttaggtgacactatagaatcgtcgacccacgcgtccggttgttgctgtagtggcggagaggatcgtggtactgctatggcggaatcatcggaatccttcaccatggcatccagcccggcccagcgtcggcgaggcaatgatcctctcacctccagccctggccgaagctcccggcgtactgatgccctcacctccagccctggccgtgaccttccaccatttgaggatgagtccgaggggctcctaggcacagaggggcccctggaggaagaagaggatggagaggagctcattggagatggcatggaaagggactaccgcgccatcccagagctggacgcctatgaggccgagggactggctctggatgatgaggacgtagaggagctgacggccagtcagagggaggcagcagagcgggccatgcggcagcgtgaccgggaggctggccggggcctgggccgcatgcgccgtgggctcctgtatgacagcgatgaggaggacgaggagcgccctgcccgcaagcgccgccaggtggagcgggccacggaggacggcgaggaggacgaggagatgatcgagagcatcgagaacctggaggatctcaaaggccactctgtgcgcgagtgggtgagcatggcgggcccccggctggagatccactaccgcttcaagaacttcctgcgcactcacgtcgacagccacggccacaacgtcttcaaggagcgcatcagcgacatgtgcaaagagaaccgtgagagcctggtggtgaactatgaggacttggcagccagggagcacgtgctggcctacttccctgcctgaggcaccggcggagctgctgcagatctttgatgagctgccctggaaggtgtactggccatgtaccccaaatacgaccgaatcaccaacacatcatgtccgcatctctcacctgcctcttgtgaggatctgccctcgctgagcagctgctctgacctctgatcccc

SEQ ID NO: 38 - DNA, 1126 bp, Homo Sapiens
acactttaagaggaagaaaattaactatgagaggtcgcatcaccatcaccatcacggatcctatttaggtgacactatagaatcgtcgacccacgcgtccgcccacgcgtccgcccacgcgtccgcttccccagagacacctgattcttctgcttcaaaagtcctcaaaagagagggaactgatacaactgcaaagactagcaaactgcggggactgaagcctaagaagaccacaactcggcgacccaagcccacgcgcccagccagtactggggtggctggggccagtagctccctgggcccctctggctcagcgtcagcaggtgagctgagcagcagtgagcccagcaccccggctcagactccgctggcagcacccatcatccccacgccggtcctcacctctcctggagcagtccccccgcttccttccccatccaaggaggaggagggactaagggctcaggtgcgggacctggaggagaaactagagaccctgagactgaaacgggcagaagacaaagcaaagctaaaagagctggagaaacacaaaatccagctggagcaggtgcaggaatggaagagcaaaatgcaggagcagcaggccgacctgcagcggcgcctcaaggaggcgagaaaggaagccaaggaggcgctggaggcaaaggaacgctatatggaggagatggctgatactgctgatgccattgagatggccactttggacaaggagatggctgaagagcgggctgagtccctgcagcaggaggtggaggcactgaaggagcgggtggacgagctcactactgacttagagatcctcaaggctgagattgaagagaagggctcagatggcgctgcatccagttatcagctcaagcagcttgaggagcagaatgcccgcctgaaggatgccctgtgaggatgcgggatctttcttcctcagagaagcaggagcatgtgaagctccagaagctcatggaaagaagaaccaggagctggaagttgtgagcaacagcgggagcgtctgcagaggagctagcaagcagagagcacatgatgagctcaagagcagtgatgctgctctggtgctgaggagatgtggaatatgctgacaatcgacctg

SEQ ID NO: 39 - DNA, 933 bp, Homo Sapiens
ttctttaagagggagaaattaactatgagaggtcgcatcaccatcaccatcacggatcctatttaggtgacactatcagaatcgtcgacccacgcgtccgtggcggagaagctgctacagctgcagaacttcaacacgctgatggcagtggtcgggggcctgagccacagctccatctcccgcctcaaggagacccacagccacgttagccctgagaccatcaagctctgggagggtctcacggaactagtgacggcgacaggcaactatggcaactaccggcgtcggctggcagcctgtgtgggcttccgcttcccgatcctgggtgtgcacctcaaggacctggtggccctgcagctggcactgcctgactggctggacccagcccggacccggctcaacggggccaagatgaagcagctctttagcatcctggaggagctggccatggtgaccagcctgcggccaccagtacaggccaaccccgacctgctgagcctgctcacggtgtctctggatcagtatcagacggaggatgagctgtaccagctgtccctgcagcgggagccgcgctccaagtcctcgccaaccagccccacgagttgcaccccaccaccccggcccccggtactggaggagtggacctcggctgccaaacccaagctggatcaggccctcgtggtggagcacatcgagaagatggtggagtctgtgttccggaactttgacgtcgatggggatggccacatctcacaggaagaattccagatcatccgtgggaacttcccttacctcagcgcctttggggacctcgaccagaaccaggatggctgcatcagcagggaggagatggtttcctatttcctgcgctccagctctgtgttgggggggcgcatgggtcttccttacacaacttcccaggatagcaacctc

SEQ ID NO: 40 - DNA, 895 bp, Homo Sapiens
ctttcttttagggggagaaattaactatgagaggtcgcatcaccatcaccatcacggatcctatttaggtgacactatagaatcgtcgacccacgcgtccgagcgccggcaccgcgagcaccctaaagtcaacgtgcctggcagccaagcccagttgaaggaggtgtgggaggagctggatggactggaccccaacagggaccttacacatcccgtcctcggtcccctgagataccttgccatcctcttcccttcagatatcaacagtgatggtgtcctggatgagcaggagctggaggcactcttcaccaaggagctggagaaagtgcacgacccaaagaatgaggaggacgacatgcgggagatggaggaggagcgactgcgcatgcgggagcatgtgatgaagaatgtggacaccaaccaggaccgcctcgtgaccctggaggagttcctcgcatccactcagaggaaggagtttggggacaccggggagggctgggagacagtggagatgcaccctgcctacaccgaggaagagctgaggcgctttgaagaggagctggctgcccgggaggcagagctgaatgccaaggcccagcgcctcagccaggagacagaggctctagggcggtcccagggccgcctggaggcccagaagagagagctgcagcaggctgtgctgcacatggagcagcggaagcagcagcagcagcagcagcaaggccacaaggcctcggctgcccaccctgaggggcagctcaagtttccacccagacacagacgatgtacctgtcccagctccagccggtgaccagaaaggaggtggacacttcgtaaaagaaccttcctcgagcggctccctgaggttgaggtgtcccgacatctgtgatctccg

SEQ ID NO: 41 - DNA, 1188 bp, Homo Sapiens
atttttaaggagggaaaaattaactatgagaggatcgcatcaccattcaccatcacggtcgacccacgcgtccgcccacgcgtccggaagaatttctctttagttctttgcaagaaggtagagataaagacactttttcaaaaatggcaatggtatcaaaattcctcaagcaggcctggtttattgaaaatgaagagcaggaatatgttcaaactgtgaagtcatccaaaggtggtcccggatcagcggtgagcccctatcctaccttcaatccatcctcggatgtcgctgccttgcataaggccataatggttaaaggtgtggatgaagcaaccatcattgacattctaactaagcgaaacaatgcacagcgtcaacagatcaaagcagcatatctccaggaaacaggaaagcccctggatgaaacactgaagaaagcccttacaggtcaccttgaggaggttgttttagctctgctaaaaactccagcgcaatttgatgctgatgaacttcgtgctgccatgaagggccttggaactgatgaagatactctaattgagattttggcatcaagaactaacaaagaaatcagagacattaacagggtctacagagaggaactgaagagagatctggccaaagacataacctcagacacatctggagattttcggaacgctttgctttctcttgctaagggtgaccgatctgaggactttggtgtgaatgaagacttggctgattcagatgccagggccttgtatgaagcaggagaaaggagaaaggggacagacgtaaacgtgttcaataccatccttaccaccagaagctatccacaacttcgcagagtgtttcagaaatacaccaagtacagtaagcattgacatgaacaaagttctggacctggagttgaaaggtgacattgagaatgcctcacagctattcgtgagtgcgccccaggaaacagctttctttgcaaagaagcttctcaagcatgaaagggttgaaactcgccataaggattgatcaggataaggtttcccgttctgaaaatgacatgaatgatatcaaagcattctatcagaagatgaatggtctctcttgccaagccatcctgatgaaccaaggaaaatatagcaaaactctgtggctccattgggagaaataacatcctcctgatggtatcct

SEQ ID NO: 42 - DNA, 896 bp, Homo Sapiens
aattttaaaggaggagaattaactatgagaggtcgcatcaccatcaccatcacggatcctatttaggtgacactatagaatcgtcgacccacgcgtccgcagagattgaggacgaggaggagaaggtctccaggtaccgagagctgctggtgcggctgccccctgtcaaccgggccacagtgaaggcccttatcagccacctgtactgtgttcagtgcttctcagacacgaaccagatgaacgtgcacaacctggcaattgtgtttgggcccacgctcttccagacagatgggcaggactacaaggctggccgtgtggtggaagacctcattaaccactatgtggtggtgtttagtgtggatgaggaagagctcaggaagcagcgggaggagatcactgccattgtgaagatgcgcgtggctggcactgccagtgggacccagcatgccggtgacttcatctgcacagtgtatctggaagagaagaaggcagagactgagcagcatatcaaggtcccagcatccatgactgctgaggagctcaccctggagatcctggatcgccggaacgtgggcatcagggagaaggactattggacctgctttgaggtcaacgagagggaggaggcagagcgccccctgcactttgcggagaaggtgctgcccatcctgcacgggctgggcacggacagccacctggtggtgaagaagcaccaggccatggaggccatgctgctgtacctggccagccgtgtcggtgacaccaagcatggcatgatgaatttccgtgagggaccgcagcctcctgggcctggcctgccctcaagtggcttccacgatcgttacttcatccttcaacagcagctgctttgcggttctacaaggaggtcccggatt

SEQ ID NO: 43 - DNA, 969 bp, Homo Sapiens
attttaagaggagaaattaactatgagaggtcgcatcaccatcaccatcacggatcctatttaggtgacactatagaatcgtcgacccacgcgtccggggagctcgcattctcttgtgttcgtgttgccctcgtgcccatcaagtgcagtcgggacctcccaggacaagcacgaggcctcaggtcggccctgtggcgggtaggcaggaaggactgtcccagacgaggggcttcctctagagtctcactgctggggaggagaggactgggcctgatggaagttaacccggagctaagtcacccagagcacaggagctgccatgtcagatgggaaatctgcctatgtcataccgtgacagcccgcaggatcaggtgacttctagcagagaccctggtttttttcctgtgcccactccggcttgtcctcatctctacccatcccctgatgcccaggtcaccgggagggctgctgggagcctctcctgtccccgccgggcagtgtcactgagtccttgaaatcctcccctgccccgcgggtctctggattgggacgcacagtgcagttgaggtctgcgtcgggcttggcttttcacaaaggctgatgtcttaactgtcacccatatggtccctgggccaccgggcagcctggggcggtgtgtgtgccatgtcacagcatggcctctcggccttgggaaggaaggcagtgcctgctctgctgtgagccgccaggaaccctcctcctgtcaatgggggtgtagtatttttgccaaaatatcatgttcaatttcagtagtttgatcagttgaggctagaagtgtgaagtgcagatgagtgtgtgttcttccccaaggccccccacagctccaggacaccgctgtcctgtcatttgtggcccatcatcttgtaggaactcatctcttcctgaggatccgggaggttggaccagtccgtcgtgcattcagtggggccg

SEQ ID NO: 44 - DNA, 1188 bp, Homo Sapiens
atttttaaggaggagaattaactatgagaggtcgcatcaccatcaccatcacggatcctatttaggtgacactatagaatcgtcgacccacgcgtccgcccacgcgtccgctcgtgccatcctggtggatctagaacctgggaccatggactctgttcgctcaggtccttttggccagatctttagaccagacaactttgtatttggtcagtctggggcaggtaacaactgggccaaaggccactacacagagggcgccgagctggttgattctgtcctggatgtggtacggaaggaggcagagagctgtgactgcctgcagggcttccagctgacccactcactgggcgggggcacaggctctggaatgggcactctccttatcagcaagatccgagaagaataccctgatcgcatcatgaataccttcagtgtggtgccttcacccaaagtgtctgacaccgtggtcgagccctacaatgccaccctctccgtccatcagttggtagagaatactgatgagacctattgcattgacaacgaggccctctatgatatctgcttccgcactctgaagctgaccacaccaacctacggggatctgaaccaccttgtctcagccaccatgagtggtgtcaccacctgcctccgtttccctggccagctcaatgctgacctccgcaagttggcagtcaacatggtccccttcccacgtctccatttctttatgcctggctttgcccctctcaccagccgtggaagccagcagtatcgagctctcacagtgccggaactcacccagcaggtcttcgatgccaagaacatgatggctgcctgtgacccccgccacggccgatacctcaccgtggctgctgtcttccgtggttcggatgtccatgaaggaggtcgatgagcagatgcttacgtgcagaacaagaacaagcagctactttgtggaatggatccccaacaatgtcagacagccgtctggtgacatcccaccttcgtggcctcaagatggcagtcacttcattgcaataggcacaagccatccagagctcttcagcgcatctcggagcagtcactgcaatgtccgcgagctctccactgtacccaggcaagggcatgtgacggaatggattcaccgaagctgaagcacatgaaacgaacctcgtctcttgaatatcc

SEQ ID NO: 45 - DNA, 885 bp, Homo Sapiens
ctttttaaagaggagaattaactatgagaggtcgcatcaccatcaccatcacggatcctatttaggtgacactatagaatcgtcgacccacgcgtccgggaagctgttcggggctggagggggtaaggccggcaagggcggcccgaccccccaggaggccatccagcggctgcgggacacggaagagatgttaagcaagaaacaggagttcctggagaagaaaatcgagcaggagctgacggccgccaagaagcacggcaccaaaaacaagcgcgcggccctccaggcactgaagcgtaagaagaggtatgagaagcagctggcgcagatcgacggcacattatcaaccatcgagttccagcgggaggccctggagaatgccaacaccaacaccgaggtgctcaagaacatgggctatgccgccaaggccatgaaggcggcccatgacaacatggacatcgataaagttgatgagttaatgcaggacattgctgaccagcaagaacttgcagaggagatttcaacagcaatttcgaaacctgtagggtttggagaagagtttgacgaggatgagctcatggcggaattagaagaactagaacaggaggaactagacaagaatttgctggaaatcagtggacccgaaacagtccctctaccaaatgttccctctatagccctaccatcaaaacccgccaagaagaaagaaagaggaggacgacgacatgaaggaatttggagaactgggctggatccatgtaatggggtccagcgctggctgggcccagacagactgtggtggcctgcgcagcgagcagcgtgtgcgtgtgtgtggcaggcaggatgtgtgcaagacagttccatcgttaccactctactcgaagc

SEQ ID NO: 46 - DNA, 885 bp, Homo Sapiens; identical to SEQ ID NO: 45

SEQ ID NO: 47 - DNA, 1049 bp, Homo Sapiens
tactttaagaagagaattaactatgagaggtcgcatcaccatcaccatcacggatcctatttaggtgacactatagaatcgtcgacccacgcgtccgctgaagcaggcgctcttggctcggcgcggcccgctgcaatccgtggaggaacgcgccgccgagccaccatcatgcctgggcacttacaggaaggcttcggctgcgtggtcaccaaccgattcgaccagttatttgacgacgaatcggaccccttcgaggtgctgaaggcagcagagaacaagaaaaaagaagccggcgggggcggcgttgggggccctggggccaagagcgcagctcaggccgcggcccagaccaactccaacgcggcaggcaaacagctgcgcaaggagtcccagaaagaccgcaagaacccgctgccccccagcgttggcgtggttgacaagaaagaggagacgcagccgcccgtggcgcttaagaaagaaggaataagacgagttggaagaagacctgatcaacaacttcagggtgaagggaaaataattgatagaagaccagaaaggcgaccacctcgtgaacgaagattcgaaaagccacttgaagaaaagggtgaaggaggcgaattttcagttgatagaccgattattgaccgacctattcgaggtcgtggtggtcttggaagaggtcgagggggccgtggacgtggaatgggccgaggagatggatttgattctcgtggcaaacgtgaatttgataggcatagtggaagtgatagatctggcctgaagcacgaggacaaacgtggaggtagcggatctcacaactgggggaactgtcaaagacgaaattaacagagtcccccaaatacattcagaaacaaatatcttataattacagtgacttggatcaatcaaatgtgactgaggaaacacctgaaggtgaagaacatcatccagtggcagacactgaaaataaggagaatgaagttgaagaggtaaaagaggaggttccaaagagaatgacttttgatgagtggaaagctaacttcaaaata

SEQ ID NO: 48 - DNA, 1161 bp, Homo Sapiens
taatttaagaggggagaaattactatgagaggatcgcatcaccatcaccatcacggatcctatttaggtgacactatagaatcgtcgacccacgcgtccgcccacgcgtccgcccacgcgtccgggctaatatttttccttcacaaaatttgggcctactccactggactcctcagggaagaaggagaaagggccaacccctgaagaagcaatacagaaactgaaggagacagagaagatactgatcaagaaacaggaatttttggagcagaagattcaacaggagctacaaacagccaagaagtatgggaccaagaataagagagctgccctacaggctttgcggaggaagaaaagattcgaacagcagctggcacaaactgacgggacattatccaccctggagtttcagcgtgaggccattgagaatgccactaccaatgcagaagtccttcgtaccatggagcttgctgcccaaagcatgaagaaggcctaccaggacatggacattgacaaggtagatgaactgatgactgacatcacggaacaacaggaggtggcccagcagatctcagatgccatttctcggcctatgggctttagagatgatgtggatgaggatgaactgctggaggagctagaggagctggagcaggaggaattggcccaggagttgttaaatgtgggcgacaaggaagaagaaccctcagtcaaattgcctagtgtaccttctactcatctgccggcagggccagctcccaaagtggatgaagatgaagaagcactaaagcagttggctgagtgggtatcctgataaatctgggcttgtcttcctaatgctacctttgttggtcctttcttccttaagtgccaagtgctgagctaaaggaggataactttttggggaagtcatgctgagggtggtagtgtgaccctgcctgaaaaaaggtctcttaccctcccagccctgctcaactctgaagaggatcttgctacagaggagcccttgggctcccttctcttgatagcagttatatgcccttgtcccaataaactggcagatgaaaaaaaataataatgccgcgctcctaagtgatcgattagctatagctgactgactctgttgagatcagatgactccaactcccatctggatggtca

SEQ ID NO: 49 - DNA, 944 bp, Homo Sapiens
cattttaagaaggagaaattaactatgagaggtcgcatcaccatcaccatcacggatcctatttaggtgacactatagaatcgtcgacccacgcgtccggtgaactcaagcgcaattttatggaatccacacctgagccgccccctagtgaatgggaaaaacgacgtatcacacctctgtccctacagactgagggacacgtgctcccgactccgaaggcccttggactggaaccggggatgcggttaacccaccaatggaaaaaacagagatggtaacaatttctgatgcctcacaaaggacagaaatctccaccaaagaagtccccattgacccaactgacacccaaaccatcacatatgagtctccacagattgatggcggggctggtggtgattcgggcacgttactgaccgcacaaaccatcacatctgattccgtgtcaacaacgacaaccacacacatcaccaagactgtaaaaggtggaatttctgaaacaagaattgataaacgcattgtgatcacaggagatggagatattgatcatgaccaggcactggctcaggcgatcagggaagccagagagcagcaccctgacatgtcggtcacaagagtggtggtacacaaagaaacagagttggctgaggaaggggaagattaagtaagaaagtcattttttaaacaacactcaactttgtgaacccctgaagattttttgaccgttccaagtcttaatgccacaccactattccagcgaatttatgctacaactggtaacaatgaccagaagcctgaagaattaaaatgccaacaccaaacctttccttaccagctctggtctatattgctcccatgcatttaatatattattttgttttataaccacttctaaatattctcagttctttctttttgttgttgttaattaaggggttttggttttg

SEQ ID NO: 50 - DNA, 974 bp, Homo Sapiens
aactttaaagaaggaagaattaactatgagaggtcgcatcaccatcaccatcacggatcctatttaggtgacactatagaatcgtcgacccacgcgtccggggggatctggtggcctggcttgtgccaaggaggccgcccagctgggaaggaaggtggccgtggtggactacgtggaaccttctccccaaggcacccggtggggcctcggcggcacctgcgtcaacgtgggctgcatccccaagaagctgatgcaccaggcggcactgctgggaggcctgatccaagatgcccccaactatggctgggaggtggcccagcccgtgccgcatgactggaggaagatggcagaagctgttcaaaatcacgtgaaatccttgaactggggccaccgtgtccagcttcaggacagaaaagtcaagtactttaacatcaaagccagctttgttgacgagcacacggtttgcggcgttgccaaaggtgggaaagagattctgctgtcagccgatcacatcatcattgctactggagggcggccgagataccccacgcacatcgaaggtgccttggaatatggaatcacaagtgatgacatcttctggctgaaggaatcccctggaaaaacgttggtggtcggggccagctatgtggccctggagtgtgctggcttcctcaccgggattgggctggacaccaccatcatgatgcgcagcatccccctccgcggcttcgaccagcaaatgtcctccatggtcatagagcacatggcatctcatggcacccggttcctgaggggctgtgccccctcgcgggtcaggaggctccctgatggccagctgcagtcacctggaggacagcaccaccggcaaggaggacacgggcacctttgaacacgttctgtgggccataagtcgagtcccagacacaaaagtctgaatttggagaagctgtcgtagattcttatccccgacctcc

SEQ ID NO: 51 - DNA, 1202 bp, Homo Sapiens
aactttaaaggagggagaattaactatgagaggtcgcatcaccatcaccatcacggatcctatttaggtgacactatagaatcgtcgacccacgcgtccgctctgaccagcaccatggcggttggcaagaacaagcgccttacgaaaggcggcaaaaagggagccaagaagaaagtggttgatccattttctaagaaagattggtatgatgtgaaagcacctgctatgttcaatataagaaatattggaaagacgctcgtcaccaggacccaaggaaccaaaattgcatctgatggtctcaagggtcgtgtgtttgaagtgagtcttgctgatttgcagaatgatgaagttgcatttagaaaattcaagctgattactgaagatgttcagggtaaaaactgcctgactaacttccatggcatggatcttacccgtgacaaaatgtgttccatggtcaaaaaatggcagacaatgattgaagctcacgttgatgtcaagactaccgatggttacttgcttcgtctgttctgtgttggttttactaaaaaacgcaacaatcagatacggaagacctcttatgctcagcaccaacaggtccgccaaatccggaagaagatgatggaaatcatgacccgagaggtgcagacaaatgacttgaaagaagtggtcaataaattgattccagacagcattggaaaagacatagaaaaggcttgccaatctatttatcctctccatgatgtcttcgttagaaaagtaaaaatgctgaagaagcccaagtttgaattgggaaagctcatggagcttcatggtgaaggcagtagttctggaaaagccactggggacgagacaggtgctaaagttgaacgagctgatggatatgaaccaccagtccaagaatctgtttaaagttcagacttcaatagtggcaaataaaaagtgctatttgtgaaaataaaaatacaaaataataaaaggggcgccgctccctatagtgagtcgtattaagctaattagctgagcttggactcctgttgaaagatccagtaatgacctcagactccatctgatttgttcagaacgctcgttgccgcggcgttttttattgtgagattcagctagcttggcgaaattcaggagctaagagcttaatggagaaaaaatccatgtattacacgtgattatcccattgccatcgtagg

SEQ ID NO: 52 - DNA, 1212 bp, Homo Sapiens
ctccttaggagggagaattaactatgagaggtcgcatcaccatcaccatcacggatcctatttaggtgacactatagaatcgtcgacccacgcgtccgctatcttcccttctgagtacctcagcagccacctggaggccagactcaacagagccattgtgtggctggctggctacaatgccacgacccaggagatcgtacggccttctgagctgttggcaggagtcaaagcatacattggtttcatacagtcactggcccagtttttgggtgcagatgcttccagagtcatccgcaacgccctcctgcagcagacacaaccactggattcctgtggggaacagacaatcaccacactctacacaaactggtacctggaaagtctgcttagacaggcaagcagtgggaccatcatcctctccccagccatgcaggccttcgtcagcctgcccagagaaggggagcagaacttcagtgcagaggagttctctgacatctctgagatgcgggccttggcagaactcctgggcccctatggcatgaagttcctgagtgaaaacctgatgtggcatgtgacctctcagattgtggagctgaagaagctggtggtggaaaacatggacatacttgttcagatcagatccaactttagcaagccggacttgatggcttccctgctgccccagctgacaggggctgaaaatgtgctaaagcgcatgaccatcattggggttatcctcagtttcagggccatggcccaagagggacttcgggaggttttctcctcccactgcccatttcttatgggtcccattgagtgcttgaaggagtttgtcactccagacacagacatcaaggtgaccttgagtatctttgagctggcatctgctgcaggtgtgggctgtgacattgacccagccttggtggctgccattgctaatctgaaagctgatacttcatctcctgaggaggaatataagtggcctgcctgcctctgatctttctggcagtttccctcccactccttgccactgaccctctctttaatagcattgagagatggttacaacaacaatatcattgcttgaccaaagcatcatcagtgctgctgcctcttcacgctctacaacagacattgactcacctcaagactttctggtgggggcccggttagcctctgcagttggcagagactggacaagcttaaaaccga

SEQ ID NO: 53 - DNA, 1241 bp, Homo Sapiens
aacttaaaggaaggaaaattaaactatgagaggtcgcatcaccatcaccatcacggatcctatttaggtgacactatagaatcgtcgacccacgcgtccgctaggatcgcgacgggaactggagcccgaggtccccgcgcggcccgggcctggcgccctgaggggaagagcggcccggcccgagccatgacggacgggatcctagggaaggcagccacaatggagatccctatccacgggaacggcgaagccaggcagcttcctgaagatgatgggctggagcaggacctccagcaggtgatggtgtcaggacccaacctcaatgaaaccagcattgtgtctggtggctatgggggctctggtgatggactcatccccacagggtctggccgccatccatctcacagcaccactccttctggccctggagatgaggtggctcggggcattgctggagaaaagtttgacatcgtcaagaaatggggcatcaacacctataagtgcacaaagcaactgttatcagaacgatttggtcgaggctcacggactgtggacctggagctagagctgcagattgagttgctgcgtgagacgaagcgcaagtatgagagtgtcctgcagctgggccgggcactgacagcccacctctacagcctgctgcagacccagcatgcactgggtgatgcctttgctgacctcagccagaagtccccagagcttcaggaggaatttggctacaatgcagagacacagaaactactatgcaagaatggggaaacgctgctaggagccgtgaacttctttgtctctagcatcaacacattggtcaccaagaccatggaagacacgctcatgactgtgaaacagtatgaggctgccaggctggaatatgatgcctaccgaacagacttagaggagctgagtctaggccccgggatgcagggacacgtggtcgacttgagagtgcccaggccactttcaggcccatcgggacaagtatgagaagctgcgggggaggatgtgcatcaagctcagtcctgaagaaaacaagatcaaggtgatgcacaagcagctgctgctcttcacaatgctgtgtccgcttactttgctgggaacagaacagctggagcgaaaccctgcagcagttcacatcagctgcgctccaggactgaaactctggctagaggagacagtgaactgctctcagtcaacttggcttacagagcacatggggaagggac

SEQ ID NO: 54 - DNA, 1143 bp, Homo Sapiens
atttttaagaggaggattaactatgagaggtcgcatcaccatcaccatcacggatcctatttaggtgacactatagaatcgtcgacccacgcgtccgtgatcgccgccatcatgggtcgcatgcatgctcccgggaaggggctgtcccagtcggctttaccctaccgacgcaccgtccccacttggttgaaattgacatctgactacgtgaaggatcaaatttacaaactggccaataagggccttactccttcacagatcggtgtaatcctgacagattcacatggtgttgcacaagtacgttttgtgacaggcaataaaattttaagaattcttaagtctaagggacttgctcctgatcttcctgaagatctctaccatttaattaagaaagcagttgctgttcgaaagcatcttgaaaggaacagaaaggaaaatgatgctaaattccgtctgattctaatacatagccggattcaccgtttggctcgatattataataccgagcaagtcctccctcccaattggaaatatgaatcatctacagcctctgccctggtcgcataaatttgtctgtgtactcaagcaataaaatgattgtttaactgggctgtcagatgtgaaaatggccacagacccaaagaacattatcaaggaatgcctgtctgccgccagacagggaaaacatgcaagggggtgagagaccctgcgagctcgggagtcaacaccccggtgctgttcggtttcctgaacctgatgctctgggtcggaggggtgtgattcgtgttttttcattgaggctggggatttgaggaaaagcagcaaaatgccgagccaccctcccccctcctttccggggggacccctaccccattttggaaaaaaaaaaggaacccccccccacccaggccgttcctccccactgtgtagcgccccctccaggcatgccattgcccccggggagattggccccccacctataagcgccggggaaccaatggcccagcctgcttcatcccacaagcatgatgacaaggtactaattgcctgcagttctactctccagcccaccaccatgactataccgcaaggtcatagccatgtcctacttgacctgggtcaaaaactagtctgttcttagat

SEQ ID NO: 55 - DNA, 933 bp, Homo Sapiens
cgcatcaccatcaccatcacggatcctatttaggtgacactatagaatcgtcgacccacgcgtccggtgatattgtagacatcaagggaatgggtactgttcaaaaaggaatgccccacaagtgttaccatggcaaaactggaagagtctacaatgttacccagcatgctgttggcattgttgtaaacaaacaagttaagggcaagattcttgccaagagaattaatgtgcgtattgagcacattaagcactctaagagccgagatagcttcctgaaacgtgtgaaggaaaatgatcagaaaaagaaagaagccaaagagaaaggtacctgggttcaactaaagcgccagcctgctccacccagagaagcacactttgtgagaaccaatgggaaggagcctgagctgctggaacctattccctatgaattcatggcataataggtgttaaaaaaaaaaataaaggacctctgggctacaaaaaaaaaaaaaaaaaaaaaaaaaaaaagggcggccgctccctatagtgagtcgtattaagcttaattagctgagcttggactcctgttgatagatccagtaatgacctcagaactccatctggatttgttcagaacgctcggttgccgccgggcgttttttattggtgagaatccaagctagcttggcgagattttcaggagctaaggaagctaaaatggagaaaaaaatcactggatataccaccgttgatatatcccaatggcatcgtaaagaacattttgaggcatttcagtcagttgctcaatgtacctataaccagaccgttcagctggatattacggcctttttaaagaccgtaaagaaaaataagcacaagttttatccgggcctttattcacattcttgcccgcctgatgaatgctcatccggaatttcgtatggcaatgaaaga

SEQ ID NO: 56 - DNA, 889 bp, Homo Sapiens
tgagaggatcgcatcaccatcaccatcacggatcctatttaggtgacactatagaatcgtcgacccacgcgtccgcccacgcgtccgagcaccgccccctggacgagcgggccctgcaggagaagctgaagtactttcccgtgtgcgtgagcaccaagccggagcccgaggacgatgcagaagagggacttgggggtcttcccagcaacatcagctctgtcagctccttgctgctcttcaacaccactgagaacctgtacaagaagtatgtcttcctggaccccctggctggtgctgtaacaaagacccatgtgatgctgggggcagagacagaggagaagctgtttgatgcccccttgtccatcagcaagagagagcagctggaacagcaggtcccagagaactacttctatgtgccagacctgggccaggtgcctgagattgatgttccgtcctacctgcctgacctgcccggcattgccaacgacctcatgtacagtgccgacctgggccccggcattgccccctctgcccctggcaccattccggaactgcccaccttccacactgaggtagccgagccactcaaggcagacctacaagatggggtactaacagcaccaccaccacccccaccgcccccaccacctcccccagctcctgaggtgctggccagtgcatccccactcccaccctcaaccgcggcccctgtaggccaaggcgccaggcaggacgacggcagcagcagcgcgtctccttcagtccagggagctcccagggaagtggtcgacccctccggtggccgggccactctgctagagtccatccgccaagctgggggcatcggcaaggccaagctgcgcagcgtgaaggagcgaaagctggagaa

SEQ ID NO: 57 - DNA, 1093 bp, Homo Sapiens
cccctttaagaaggagaattaactatgagaggtcgcatcaccatcaccatcacggatcctatttaggtgacactatagaatcgtcgacccacgcgtccgtaggagaagtgattcttgtgggtggcatgactaggatgcccaaggttcagcagactgtacaggatctttttggcagagccccaagtaaagctgtcaatcctgatgaggctgtggccattggagctgccattcagggaggtgtgttggccggcgatgtcacggatgtgctgctccttgatgtcactcccctgtctctgggtattgaaactctaggaggtgtctttaccaaacttattaataggaataccactattccaaccaagaagagccaggtattctctactgccgctgatggtcaaacgcaagtggaaattaaagtgtgtcagggtgaaagagagatggctggagacaacaaactccttggacagtttactttgattggaattccaccagcccctcgtggagttcctcagattgaagttacatttgacattgatgccaatgggatagtacatgtttctgctaaagataaaggcacaggacgtgagcagcagattgtaatccagtcttctggtggattaagcaaagatgatattgaaaatatggttaaaaatgcagagaaatatgctgaagaagaccggcgaaagaaggaacgagttgaagcagttaatatggctgaaggaatcattcacgacacagaaaccaagatggaagaattcaaggaccaattacctgctgatgagtgcaacaagctgaaagaagagatttccaaaatgagggagctcctgctagaaaagacagcgaaacaggagaaaatattagacaggcagcatcctctcttcagcaggcatcactgaagctgttcgaaatggcatacaaaaagatggcatctgagcgagacgctctggaagttctggcactggggaacaaaagaagatcaaaaggaggaaaacagtaataatagcagaaattttgaagccagaagacacatatgaagcttaggattgagagactttcctggacagaattggccgaccttcgcctttttactgtg

SEQ ID NO: 58 - DNA, 604 bp, Homo Sapiens
gatatttatgagggagaaatttaacttatgagaggtcgcatcaccatcaccatcacggatcctatttaggtgacactatagaatcgtcgacccacgcgtccgcggacgcgtggggcagccgcagcggcggcggcgacgcgagcggcagcagcccgggccccgcggtagccgccagcgcggcacggccagcaggagcgccaggcgcgagcccgcggccactcgctgcctccggggcactgcgagaggctttgcgctccccagcgcggcgttcggactcggggccagcgcggccacggccgcgcacaaaggacagcagacgccgggactcgggggctgtgcccagggaccggcccggggacccccgcccgcgccgcgtcccctccacgcctcccctccccgggcggccggagcgcgagccggagcgggccccgtcatatgacagcggcgacgccgcagccggcgagcgcgcgtgctgcctgccccgctgcgccacggccgccggcgcctggggtggcccttgcctcgccccgctgagcggtcgcccgtcgccgccgccccgcgccccccgcgcccgggcttgcgggctccgggggaggatctaggg

SEQ ID NO: 59 - DNA, 913 bp, Homo Sapiens
ctatgagaggatcgcatcaccatcaccatcacggatcctatttaggtgacactatagaatcgtcgacccacgcgtccgggaagcacaaaaagggacagtcggaagaaattcaaaagaaaagaacccgccgagcagtcaaattccagagggccattactggtgcatctcttgctgatataatggccaagaggaatcagaaacctgaagttagaaaggctcaacgagaacaagctatcagggctgctaaggaagcaaaaaaggctaagcaagcatctaaaaagactgcaatggctgctgctaaggcacctacaaaggcagcacctaagcaaaagattgtgaagcctgtgaaagtttcagctccccgagttggtggaaaacgctaaactggcagattagatttttaaataaagattggattataaaaaaaaaaaaaaaaaaaaaaaaaaaaaaaaaaaaaaaaaaaaaaaagggcggccgctccctatagtgagtcgtattaagcttaattagctgagcttggactcctgttgatagatccagtaatgacctcagaactccatctggatttgttcagaacgctcggttgccgccgggcgttttttattggtgagaatccaagctagcttggcgagattttcaggagctaaggaagctaaaatggagaaaaaaatcactggatataccaccgttgatatatcccaatggcatcgtaaagaacattttgaggcatttcagtcagttgctcaatgtacctataaccagaccgttcagctggatattacggcctttttaaagaccgtaaagaaaaataagcacaagttttatccggcctttattcacattcttgcccgcctgatgaatgctcatccgggaatttcgtatggcaatgaaagacggtgagctggtgatatgg

SEQ ID NO: 60 - DNA, 1086 bp, Homo Sapiens
ctctttaaggaaggagaattaactatgagaggtcgcatcaccatcaccatcacggatcctatttaggtgacactatagaatcgtcgacccacgcgtccgggggcgcggcctccggcggaggagggaacagctgggacctcccgggttcccacgtgcggctgccggggcgtgcacagtctgggacccgtggcggtgctggcaacacaagcaccagctgcggggactccaacagcatctgcccggccccctccacgatgtccaaggccgaggaggccaagaagctggcgggccgcgcggctgtggagaaccacgtgaggaataaccaagtgctgggaattggaagtggttctacaattgtccatgctgtgcagcgaatagctgaaagggtgaagcaagagaatctgaacctcgtctgtattcccacttccttccaggcccgccagctcatcctgcagtatggcttgaccctcagtgatctggatcgacacccagagatcgaccttgccatcgatggtgctgatgaagtagatgctgatctcaatctcatcaagggtggcggaggctgcctgacccaggagaagattgtggctggctatgctagtcgcttcatcgtgatcgctgatttcaggaaagattcgaagaatctcggggatcagtggcacaagggaatccccatcgaggtcatcccaatggcctatgtcccagtgagccgagctgtgagccagaagtttgggggcgtggttgaacttcgaatggctgtcaacaaggctggtcctgtggtgacagataatgggaattttatcttggactggaagtttgaccgggtacacaaatggagtgaagtgaatacagctatcaaaatgatcccaggtgtggtggacacaggcctattcatcaacatggctgagagagtctactttgggatgcaggatggctcagtgaacatgagggagaagcctttctgttgaccctgcaaggagcagagtgtgtcaccttgagtctccagcccacagctaaggtggacgtacctctccaggagcctttgccctaatgtatctctgcctgacaacttgtgtgtgggggtgg

SEQ ID NO: 61 - DNA, 1176 bp, Homo Sapiens
ctttttaaaggaggaagaattaactatgagaggtcgcatcaccatcaccatcacggatcctatttaggtgacactatagaatcgtcgacccacgcgtccgatccccagcccgccgccatggccgcctacaaactggtgctgatccggcacggcgagagcgcatggaacctggagaaccgcttcagcggctggtacgacgccgacctgagcccggcgggccacgaggaggcgaagcgcggcgggcaggcgctacgagatgctggctatgagtttgacatctgcttcacctcagtgcagaagagagcgatccggaccctctggacagtgctagatgccattgatcagatgtggctgccagtggtgaggacttggcgcctcaatgagcggcactatggcggtctaaccggtctcaataaagcagaaactgctgcaaagcatggtgaggcccaggtgaagatctggaggcgctcctatgatgtcccaccacctccgatggagcccgaccatcctttctacagcaacatcagtaaggatcgcaggtatgcagacctcacagaagatcagctaccctcctgtgagagtctgaaggatactattgccagagctctgcccttctggaatgaagaaatagttccccagatcaaggaggggaaacgtgtactgattgcagcccatggcaacagcctccggggcattgtcaagcatctggagggtctctctgaagaggctatcatggagctgaacctgccgactggtattcccattgtctatgaattggacaagaacttgaagcctatcaagcccatgcagtttctgggggatgaagagacggtgcgcaaagccatggaagctgtggctgcccagggcaaggccaagaagtgaaggccggcggggaggatactgtccccagagcaccctccctgcccgtcttgtccctctgccctcccacctgcacatgtcacactgaccacatctgtagacatcttgagttgtagctgcagacggggaccagtgctcccattttcattttagccattttgtcgcctgcaccacctccctcatacatctagtcgatagcagttctagaagcacagttctcagtctagctatggaaaagctccccttatccacgaatttaaaggtatgacttgggctttggcggagtgctttgttact

SEQ ID NO: 62 - DNA, 975 bp, Homo Sapiens
ccctaaagaaggaggaattaactatgagaggtcgcatcaccatcaccatcacggatcctatttaggtgacactatagaatcgtcgacccacgcgtccgatccagtcttgggaacgtactgggacaactgtaaccgttgcacctgccaggagaacaggcagtggcagtgtgaccaagaaccatgcctggtggatccagacatgatcaaagccatcaaccagggcaactatggctggcaggctgggaaccacagcgccttctggggcatgaccctggatgagggcattcgctaccgcctgggcaccatccgcccatcttcctcggtcatgaacatgcatgaaatttatacagtgctgaacccaggggaggtgcttcccacagccttcgaggcctctgagaagtggcccaacctgattcatgagcctcttgaccaaggcaactgtgcaggctcctgggccttctccacagcagctgtggcatccgatcgtgtctcaatccattctctgggacacatgacgcctgtcctgtcgccccagaacctgctgtcttgtgacacccaccagcagcagggctgccgcggtgggcgtctcgatggtgcctggtggttcctgcgtcgccgaggggtggtgtctgaccactgctaccccttctcgggccgtgaacgagacgaggctggccctgcgcccccctgtatgatgcacagccgagccatgggtcggggcaagcgccaggccactgcccactgccccaacagctatgttaataacaatgacatctaccaggtcactcctgtctaccgcctcggctccaacgacaaggagatcatgaaggagctgatggagaatggccctgtccaagccctcatggaggtgcatgaggacttcttcttatacaagggaggcatctacagccacacgccagtgagctttggaaggcagagagaaaccgccgggcatgggacccactcgtcaagata

SEQ ID NO: 63 - DNA, 149 bp, Homo Sapiens
taactatgagaggtcgcatcaccatcaccatcacggatcctatttaggtgacactatagaatcgtcgacccacgcgtccggccatgttgtcggtagcagcccgctcgggcccgttcgcgcccgtcctgtcggccacgtcccgcggggtg

SEQ ID NO: 64 - DNA, 1240 bp, Homo Sapiens
ttacttaaggaaggaaaattaaactatgagaggtcgcatcaccatcaccatcacggatcctatttaggtgacactatagaatcgtcgacccacgcgtccgctgcactccagcctgggcgacagagcgagactccgtctcaaaaaaaaaaaaaaaaaaaaaaaaaaaatgctcaacatcactaattatcagggaaatgcaaatcaaaaaccacaatgtgataccaccttactcctgcaagaatgaccataatttaaaattcaaaaaataatagatgttggcatggatgtagtgaaaagggagcacttttatactgctggtgggaacgtaaactagtacaaccactatagaaaacagtatggagactccttaaagaactgaaaatagaactacattccatccagcaatcccactacttggtatctatccagaggaaaagaagtcattacatgaaaaagacacttgcacatgcatgtttatagcagcacaatttgcaattgcaaatatatggaaccagcctaaacgtccatcaaccaataagtggataaagaaaatatggtatatatacatacatatataccatggaatactactcagccataaaaaggaattaaataatggcattcacagcaacttggatggagttggagaccattattctaagtgaagtaactcaggaatagaaaatcaaacattgttatgttttcacttacaagcaggagctaagctatgaggatgcaaaggcataagaatgatgtaatggactctggggactcaggggaaaggatgggacagggggatgagggataagactacatattaggtacagcgtatattgcttggatgatgggtgcaccaaaatctcaaaaatcaccactaaaaaatttatctatgtaaccagacagcacctgctccccaaaaactattgaaataattaaaaaaaaaaaaaaagggcggccgctccctatagtgagtcgtattaagcttaattagctgagctggactcctgtgataaaatccagtaatgacctcagactccatctggaatttgttcagaaccgctcggttgcggcgggcggttttttatggtgagaatcaagctagcttggcggagattccaggagctagagctaaatggaagaaaaattcactggaatacacggtgattatcaatggcatcgtagaactgaggcatcagtcttgtccaagtaccttaacgaacggttcactgggaataggcct

SEQ ID NO: 65 - DNA, 1026 bp, Homo Sapiens
tattttaaggaggaagaattaactattgagaggtcgcatcaccatcaccatcacggtcgacccacgcgtccggaaaagagtcttgtggataccgtatatgcattaaaggatgaagttcaagaattaagacaggacaacaaaaagatgaagaaatctctagaggaagaacagagagcccgcaaagacctggagaagctggtgaggaaagtcctgaagaacatgaatgatcctgcctgggatgagaccaatctataagggacgtcctcagttctttctgttgaagaccagttctgaggtgaagctgggcacccctgacccaagtcggggtgcactcaggaccacagggcagggctgggtggggcgccaccttgctctctgtatatagaaaagctggagcttattctgcgaatggagacgatcaaaccatgactgatgaatccagacaggagggattgactctgaggacctgagctacatcaatccactctgtgaacatctcagttacctcattctgcaataagttcagtgactgactaaaagtcttgtttttccagactttgaattgaatatataaatattatatatacatgtttcttgtaaatatcccattttgaatgcatacctgtggtggttctgtccgggctaatccccatgctagaatgtcctttccagctacgtgaataagaagtcccatgcccgcatccaccggaagcagaagcctggtggatgcctggttcgttccgcagcaccagggcctccaccgtgctgtggcagcaccccccatgtcggtattttctaaataaccttatttatacctgcaggagatacacttcagtcccattcagaagtcttctcttaaagcagcattacagtcccagacctgcgggttttctgagggcaactttgctggctgacagactcagtcttgacctcaaggaaggcccataccggcactgcccgcatccatctagaggtgtttgcctcttgtccgctgcctgagtactgggatcttcacatgaatttgct

SEQ ID NO: 66 - DNA, 950 bp, Homo Sapiens
atgagaggtcgcatcaccatcaccatcacggatcctatttaggtgacactatagaatcgtcgacccacgcgtccgcacagcccctgctgggacaacagagacttgagcacagcagcttccccgaagggccgggacctggctcaggggacgaagccaatgggccccggggagagaggcagacccggactcggggcccggccccatctgcaatgccccagagcaggtctaccgagtcagcccatgctgccaccctgccgcctcgaggcccagagccatctgcccaggagcagatggaggggatgctgtgccgcaagcaggagatggaggccttcgggaagaaggctgccaacaggtcctggcagaacgtgtactgtgtcctgcggcgtgggagcctcgacttttacaaggatgccaaggcagccagcgcgggagtgccataccacggagaagtgcctgtcagcctggccagggcccagggcagcgtcgcctttgattaccgaaagcgcaaacatgtcttcaagctgggcttacaggatggaaaagaatatttattccaggccaaggatgaggcagagatgagctcgtggctacgggtggtgaatgcagccattgccacagcgtcttctgcctctggagagcctgaagagccggtggtgcccagcaccacccggggcatgacccgggccatgaccatgcccccagtgtcacccgtcggggctgaggggcctgttgtgctccgcagcaaagacggcagagaacgagagcgagaaaaacgcttcagcttctttaagaagaacaagtagttgggggcaaggtcccaggccaactccctccctccgttcaggaaactgccagggacagtcgacagggaccgccctcttgtcaggacaactgcctgctgctagggtctgttgccaaggtcaacccatcaccaggaactgtcactgggg

SEQ ID NO: 67 - DNA, 893 bp, Homo Sapiens
  misc_feature (677)..(677): n is a, c, g, or t
  misc_feature (760)..(760): n is a, c, g, or t
  misc_feature (817)..(817): n is a, c, g, or t
  misc_feature (863)..(863): n is a, c, g, or t
  misc_feature (868)..(868): n is a, c, g, or t
  misc_feature (873)..(873): n is a, c, g, or t
  misc_feature (880)..(881): n is a, c, g, or t
  misc_feature (883)..(883): n is a, c, g, or t
  misc_feature (886)..(886): n is a, c, g, or t
tagagaaatactatgagaggatcgcatcaccatcaccatcacggatcctatttaggtgacactatagaatcgtcgacccacgcgtccgcggacgcgtgggggcatggcgggtcagttccgcagctacgtgtgggacccgctgctgatcctgtcgcagatcgtcctcatgcagaccgtgtattacggctcgctgggcctgtggctggcgctggtggacgggctagtgcgaagcagcccctcgctggaccagatgttcgacgccgagatcctgggcttttccacccctccaggccggctctccatgatgtccttcatcctcaacgccctcacctgtgccctgggcttgctgtacttcatccggcgaggaaagcagtgtctggatttcactgtcactgtccatttctttcacctcctgggctgctggttctacagctcccgtttcccctcggcgctgacctggtggctggtccaagccgtgtgcattgcactcatggctgtcatcggggagtacctgtgcatgcggacggagctcaaggagatacccctcaactcagcccctaaatccaatgtctagaatcaggccctttggacatcctgctgacacttgggccccttaacaccttgggctgctcagaccctccagatgaggtccagcccagatctgagaggaaccctgnaaatgtgaagtctctgttggtgtgggagagatagtgagggcctgtcaaagaaggcaggtagcagtcagcatgacagctgcaanaatgacctctgtctgttgaagcccttggtatctgagaggtcaggaaggggaacctcntttgagggtaataacataattggaaaccatgccactcttgagccanaatancctgntcaccanncntgntgttttt

SEQ ID NO: 68 - DNA, 1010 bp, Homo Sapiens
  misc_feature (735)..(735): n is a, c, g, or t
  misc_feature (800)..(800): n is a, c, g, or t
  misc_feature (807)..(807): n is a, c, g, or t
  misc_feature (824)..(824): n is a, c, g, or t
  misc_feature (831)..(831): n is a, c, g, or t
  misc_feature (833)..(833): n is a, c, g, or t
  misc_feature (842)..(842): n is a, c, g, or t
  misc_feature (851)..(851): n is a, c, g, or t
  misc_feature (866)..(866): n is a, c, g, or t
  misc_feature (913)..(914): n is a, c, g, or t
  misc_feature (919)..(919): n is a, c, g, or t
  misc_feature (929)..(929): n is a, c, g, or t
  misc_feature (939)..(940): n is a, c, g, or t
  misc_feature (942)..(943): n is a, c, g, or t
  misc_feature (951)..(951): n is a, c, g, or t
  misc_feature (964)..(964): n is a, c, g, or t
  misc_feature (979)..(979): n is a, c, g, or t
  misc_feature (987)..(987): n is a, c, g, or t
  misc_feature (990)..(990): n is a, c, g, or t
  misc_feature (996)..(996): n is a, c, g, or t
  misc_feature (1001)..(1001): n is a, c, g, or t
  misc_feature (1005)..(1005): n is a, c, g, or t
  misc_feature (1007)..(1008): n is a, c, g, or t
  misc_feature (1010)..(1010): n is a, c, g, or t
tagagagaattactatgagaggatcgcatcaccatcaccatcacggatcctatttaggtgacactatagaatcgtcgacccacgcgtccgccgtcctgcgcggttgttctctggagcagcgttcttttatctccgtccgccttctctcctacctaagtgcgtgccgccacccgatggaagattcgatggacatggacatgagccccctgaggccccagaactatcttttcggttgtgaactaaaggccgacaaagattatcactttaaggtggataatgatgaaaatgagcaccagttatctttaagaacggtcagtttaggggctggtgcaaaggatgagttgcacattgttgaagcagaggcaatgaattacgaaggcagtccaattaaagtaacactggcaactttgaaaatgtctgtacagccaacggtttcccttgggggctttgaaataacaccaccagtggtcttaaggttgaagtgtggttcagggccagtgcatattagtggacagcacttagtagctgtggaggaagatgcagagtcagaagatgaagaggaggaggatgtgaaactcttaagtatatctggaaagcggtctgcccctggaggtggtagcaaggttccacagaaaaaagtaaaacttgctgctgatgaagatgatgacgatgatgatgaagaggatgatgatgaagatgatgatgatgatgattttgatgatgaggaagctgaanaaaaagcgccagtgaagaaatctatacgagatactccagccaaaaatgcacaaaagtcaaatcanaaatggnaaaagactcaaaacccntcatcancnccaagatcnaaaaggacnaagaatccttcaaanaaacaggaaaaaaactcctaaaacaccaaaaggaccctagtttctgnnaaaanacatttaaangcaaaaatgnnanncaagtttnaaaaaaagggggnttcccctccccaaanggggaaanccnaatttntccantttntnngn

SEQ ID NO: 69 - DNA, 934 bp, Homo Sapiens
gagaggatcgcatcaccatcaccatcacggatcctatttaggtgacactatagaatcgtcgacccacgcgtccgatttggatgaacaagaatttgtttacaaggagcctgcaataaccaaacttgcagagatatctcacagattggagggattttacggagaaagatttggagaggatgtggttgaagtaatcaaagactctaatcctgtagacaagtgtaaattagatcctaacaaggcatatattcagattacctatgtggagccatactttgacacatatgagatgaaggacagaatcacctatttcgacaaaaattacaatcttcgtcgattcatgtactgtacaccctttactttagatggccgtgcccatggggaacttcatgaacaattcaaaaggaagaccattctgactacgtctcatgcctttccttatattaaaacaagggtcaatgtcactcataaagaagagatcatcttaacaccaattgaagttgctattgaggacatgcagaaaaagacacaggagttggcatttgcaacacatcaggatcccgcagaccccaaaatgcttcagatggtactccagggatctgtaggcaccacagtgaatcaggggcctttggaagttgcccaggtttttctgtctgaaatacctagtgacccaaagctcttcagacatcataataaactgcgactctgctttaaagattttactaaaaggtgtgaagatgccttaagaaaaaataagagcttaattgggccggatcaaaaggagtatcaaagggaactggagagaaactatcatcgccttaaagaggccctacagccactgatcaacagaaagatccctcagttatacaaggcagtattgcctgtcacctgccacagagattccttcagtcgaatgagccttcgcaaaatggatctc

SEQ ID NO: 70 - DNA, 785 bp, Homo Sapiens
  misc_feature (2)..(2): n is a, c, g, or t
  misc_feature (696)..(696): n is a, c, g, or t
  misc_feature (755)..(755): n is a, c, g, or t
  misc_feature (763)..(763): n is a, c, g, or t
  misc_feature (775)..(775): n is a, c, g, or t
  misc_feature (781)..(781): n is a, c, g, or t
  misc_feature (785)..(785): n is a, c, g, or t
tnagaggagaattaactatgagaggatcgcatcaccatcaccatcacggatcctatttaggtgacactatagaatcgtcgacccacgcgtccggtccgggactggtcggcggcggagccgggggacggcgacagcgggtcggcgggccgcaggagggggtcatgggtaaagactactaccagacgttgggcctggcccgcggcgcgtcggacgaggagatcaagcgggcctaccgccgccaggcgctgcgctaccacccggacaagaacaaggagcccggcgccgaggagaagttcaaggagatcgctgaggcctacgacgtgctcagcgacccgcgcaagcgcgagatcttcgaccgctacggggaggaaggcctaaaggggagtggccccagtggcggtagcggcggtggtgccaatggtacctctttcagctacacattccatggagaccctcatgccatgtttgctgagttcttcggtggcagaaatccctttgacaccttttttgggcagcggaaacggggaggaaggcatggacattgatgacccattctctggcttccctatgggcatgggtggcttcaccaacgtgaactttggccgctcccgctctgcccaagagcccgcccgaaagaagcaagatcccccagtcacccacgaccttcgagtctcccttgaagagatctacagcggntgtaccaagaagatgaaaatctcccacaagcggctaaaccccgacggaaagagcattcnaaacgaanacaaaatattgnccatcnaaan

SEQ ID NO: 71 - DNA, 981 bp, Homo Sapiens
aggatcgcatcaccatcaccatcacggatcctatttaggtgacactatagaatcgtcgacccacgcgtccggtaaatcttctcaggttcagagaagattcttcatgggaaatcaagttctaaaggtctttgcagcaagagatgatgaggcagctgcagttgcactttcctccctgattcatgctttggatgacttagacatggtggccatagttcgatatgcttatgacaaaagagctaatcctcaagtcggcgtggcttttcctcatatcaagcataactatgagtgtttagtgtatgtgcagctgcctttcatggaagacttgcggcaatacatgttttcatccttgaaaaacagtaagaaatatgctcccaccgaggcacagttgaatgctgttgatgctttgattgactccatgagcttggcaaagaaagatgagaagacagacacccttgaagacttgtttccaaccaccaaaatcccaaatcctcgatttcagagattatttcagtgtctgctgcacagagctttacatccccgggagcctctacccccaattcagcagcatatttggaatatgctgaatcctcccgctgaggtgacaacgaaaagtcagattcctctctctaaaataaagaccctttttcctctgattgaagccaagaaaaaggatcaagtgactgctcaggaaattttccaagacaaccatgaagatggacctacagctaaaaaattaaagactgagcaagggggagcccacttcagcgtctccagtctggctgaaggcagtgtcacctctgttggaagtgtgaatcctgctgaaaacttccgtgttctagtgaaacagaagaaggccagctttgaggaaggtgagtggttgactttgcatttaggagaagctgtttagttaagctaactaatttaaagtctagattaagaactgtagcctttgttgtaacactttagcatttttctttactg

SEQ ID NO: 72 - DNA, 956 bp, Homo Sapiens
atgagaggatcgcatcaccatcaccatcacggatcctatttaggtgacactatagaatcgtcgacccacgcgtccgcgaagatggccggttggcagagctacgtggataacctgatgtgcgatggctgctgccaggaggccgccattgtcggctactgcgacgccaaatacgtctgggcagccacggccgggggcgtctttcagagcattacgccaatagaaatagatatgattgtaggaaaagaccgggaaggtttctttaccaacggtttgactcttggcgcgaagaaatgctcagtgatcagagatagtctatacgtcgatggtgactgcacaatggacatccggacaaagagtcaaggtggggagccaacatacaatgtggctgtcggcagagctggtagagtcttggtctttgtaatgggaaaagaaggggtccatggaggcggattgaataagaaggcatactcaatggcaaaatacttgagagactctgggttctagctgctaggcagactgttaagtattaggggaaaattgctcttaaactttcctagctataagcttaagtcttaattctggaaattttattagcaatgcagggtgatggggtatgaacctgtgtctcctttgtatccctctgttggtggggaaaggtgtctttctttctgccctccccccccaaaataattctgttcacttttgttttgtttccttgtgtactccagcattggttatagtcatgggaaaggaaggtgtccacggaggcacacttaacaagaaagcatatgaactcgctttatacctgaggaggtctgatgtgtaagcagcctctccccatctacctagcaactgtcttcatcaacaaccctaattatggtcacaatgctaccaaactgtagatggtagctaatttttctttacctattttctaatgtcatgattcctgtttgccc

SEQ ID NO: 73 - DNA, 945 bp, Homo Sapiens
tgagaggtcgcatcaccatcaccatcacggatcctatttaggtgacactatagaatcgtcgacccacgcgtccgtgtaccagtacctcaaggacagtgccggggagcccctgtacaagctcttcaaggccatcaaacatcaggtggaaaagggcccggtggatgcggtacagaagaaggccaagtacactctcaacgacacggggctgctgggggatgatgtggagtacgcacccctgacggtgagcgtgatcgtgcaggacgagggagtggacgccatcccggtgaaggtcctcaactgtgacaccatctcccaggtcaaggagaagatcattgaccaggtgtaccgtgggcagccctgctcctgctggcccaggccagacagcgtggtcctggagtggcgtccgggctccacagcgcagatcctgtcggacctggacctgacgtcacagcgggagggccggtggaagcgcgtcaacacccttatgcactacaatgtccgggatggagccaccctcatcctgtccaaggtgggggtctcccagcagccggaggacagccagcaggacctgcctggggagcgccatgccctcctggaggaggagaaccgggtgtggcacctggtgcggccgaccgacgaggtggacgagggcaagtccaagagaggcagcgtgaaagagaaggagcggacgaaggccatcaccgagatctacctgacgcggctgctctcagtcaagggcacactgcagcagtttgtggacaacttcttccagagcgtgctggcgcctgggcacgcggtgccacctgcagtcaagtacttcttcgacttcctggacgagcaggcagagaagcacaacatccaggatgaagacaccatccacatctggaagacgaacagcttaccgctccggttctgggtgaacatcctcaagaacccccacttcat

SEQ ID NO: 74 - DNA, 984 bp, Homo Sapiens
  misc_feature (575)..(575): n is a, c, g, or t
  misc_feature (784)..(785): n is a, c, g, or t
  misc_feature (787)..(787): n is a, c, g, or t
  misc_feature (791)..(791): n is a, c, g, or t
  misc_feature (797)..(798): n is a, c, g, or t
  misc_feature (800)..(801): n is a, c, g, or t
  misc_feature (805)..(805): n is a, c, g, or t
  misc_feature (807)..(807): n is a, c, g, or t
  misc_feature (813)..(813): n is a, c, g, or t
  misc_feature (868)..(868): n is a, c, g, or t
  misc_feature (897)..(897): n is a, c, g, or t
  misc_feature (900)..(901): n is a, c, g, or t
  misc_feature (909)..(909): n is a, c, g, or t
  misc_feature (912)..(913): n is a, c, g, or t
  misc_feature (930)..(931): n is a, c, g, or t
  misc_feature (937)..(937): n is a, c, g, or t
  misc_feature (940)..(940): n is a, c, g, or t
  misc_feature (967)..(969): n is a, c, g, or t
  misc_feature (972)..(972): n is a, c, g, or t
  misc_feature (981)..(981): n is a, c, g, or t
tagagaaattactatgagaggatcgcatcaccatcaccatcacggatcctatttaggtgacactatagaatcgtcgacccacgcgtccgcacagctgtacagcacccgtgaaaagcaacagctggccagcctggtgggcacgatgctcgcttacagcctgacctaccgccaggagcgcacgcccgatggccagtacatctacaggctggagccgaacgtggaggaactctgccgcttccctgagctgcctgcccgcaagcccctcacctaccagacgaagcagctcatcgcccgcgagatcgaggtggagaagatgcggcgggcggaggcttctgcccgggtagagaacagcccccaggtggatgggagccccccagggctcgagggtctgctggggggcattggggagaaaggggtgcaccgacctgccccacgcaaccatgagcagcggctggagcacatcatgaggcgagcggcccgggaggaacagcctgagaaggacttctttggacgtgtggtcgtcaggagcacagcagtcccgagtgcaggggacacggccccggagcaggactcantggagcggcgcatgggcacagcggtgggcaggagcgaggtctggttccgcttcaacgagggtgtctccaacgccgtgcggcgcagcctgtacatcagggacttgctctagttctctgagccgcggacatgccctcgcattgcttcccgcagagtgcagagacaggaagctggagatgtctttataaagtcacacctttacagactgttnnanaaanttttannannttanantaatantaaaagggcggcccgctccctatagtgagtcgtattaagctttaattagcttgancttggaattcctgttgataaatcccagtnatnnacctccanaanntccatctgggatttttnnaaaacnctnggtttgcccccggggggtttttttttnnnganaatcccaancta

SEQ ID NO: 75 - DNA, 990 bp, Homo Sapiens
tatgagaggtcgcatcaccatcaccatcacggatcctatttaggtgacactatagaatcgtcgacccacgcgtccgctcccatcctctacgcggtctgggctgaagctggtttcctggccgaggcggagctgctgaacctgaggaagatcagctccgacttggacgggcacccggtcccgaaacaagctttcaccgacgtggccactggctccctgggccagggcctcggggccgcttgtgggatggcctacaccggcaaatacttcgacaaggccagctaccgagtctattgcttgctgggagacggggagctgtcagagggctctgtatgggaggccatggccttcgccagcatctataagctggacaaccttgtggccattctagacatcaatcgcctgggccagagtgacccggccccactgcagcaccagatggacatctaccagaagcggtgcgaggccttcggttggcatgccatcatcgtggatggacacagcgtggaggagctgtgcaaggcctttggccaggccaagcaccagccaacagccatcattgccaagaccttcaagggccgagggatcacgggggtagaagataaggagtcttggcatgggaagcccctccccaaaaacatggctgagcagatcatccaggagatctacagccagatccagagcaaaaagaagatcctggcaacccctccacaggaggacgcaccctcagtggacattgccaacatccgcatgcccagcctgcccagctacaaagttggggacaagatagccacccgcaaggcctacgggcaggcactggccaagctgggccatgccagtgaccgcatcatcgccctggatggggacaccaaaaattccaccttctcggagatcttcaaaaaggagcacccggaccgcttcatcgagtgctacattgctgagcagaacatggtgagcatcgcggtgggctgtgccacccgcaacaggacggtg

SEQ ID NO: 76 - DNA, 855 bp, Homo Sapiens
catcaccatcaccatcacggatcctatttaggtgacactatagaatcgtcgacccacgcgtccggcaaaatggcgcgggagaaggagatgcaggagttcacccgtagcttcttccgaggccgcccggacctcagcacgcttacgcattccatcgtgcggcggaggtacttagctcactcgggccgcagccacctggagcccgaggagaagcaggcactgaagcggctggtggaggaggagctgctgaagatgcaggtggatgaagccgcttccagggaagacaaactggaccttaccaagaagggcaagaggcctcccaccccttgtagcgacccggagagaaaaaggttccgcttcaattcagagtcgggctggctcaggtcgccgtggagaggaccacccggctgtgatgaggctgaagcgctacattcgggcctgtggtgcccatcgaaactacaagaagctgttgggctcctgttgctcacacaaggagcgcctgagtatcctccgggcagaactggaagcgctaggcatgaagggtaccccttccctagggaagtgtcgggccctgaaggagcagagggaggaggcagctgaggtggcctccttggatgttgcgaacatcatcagtggctcgggccggccacgcagacgtacagcctggaaccctttaggagaagcagcacccccaggggagctgtaccgacggaccctggactcagatgaagagcggccccgtcccgcacccccagactggtcacatatgcgtggcatcatcagcagtgatggcgagagtaactgagctctgccacccccaggagggacccttgatacatgtacaaagcatacatagca

SEQ ID NO: 77 - DNA, 1025 bp, Homo Sapiens
  misc_feature (1)..(1): n is a, c, g, or t
  misc_feature (181)..(181): n is a, c, g, or t
  misc_feature (461)..(461): n is a, c, g, or t
  misc_feature (546)..(546): n is a, c, g, or t
  misc_feature (669)..(669): n is a, c, g, or t
  misc_feature (712)..(712): n is a, c, g, or t
  misc_feature (770)..(770): n is a, c, g, or t
  misc_feature (777)..(777): n is a, c, g, or t
  misc_feature (788)..(788): n is a, c, g, or t
  misc_feature (799)..(799): n is a, c, g, or t
  misc_feature (807)..(808): n is a, c, g, or t
  misc_feature (813)..(813): n is a, c, g, or t
  misc_feature (822)..(822): n is a, c, g, or t
  misc_feature (860)..(860): n is a, c, g, or t
  misc_feature (871)..(871): n is a, c, g, or t
  misc_feature (884)..(884): n is a, c, g, or t
  misc_feature (901)..(901): n is a, c, g, or t
  misc_feature (904)..(904): n is a, c, g, or t
  misc_feature (915)..(915): n is a, c, g, or t
  misc_feature (927)..(927): n is a, c, g, or t
  misc_feature (930)..(930): n is a, c, g, or t
  misc_feature (945)..(945): n is a, c, g, or t
  misc_feature (964)..(964): n is a, c, g, or t
  misc_feature (968)..(969): n is a, c, g, or t
  misc_feature (974)..(975): n is a, c, g, or t
  misc_feature (1000)..(1000): n is a, c, g, or t
  misc_feature (1003)..(1003): n is a, c, g, or t
  misc_feature (1005)..(1005): n is a, c, g, or t
  misc_feature (1009)..(1009): n is a, c, g, or t
  misc_feature (1015)..(1015): n is a, c, g, or t
  misc_feature (1017)..(1017): n is a, c, g, or t
  misc_feature (1020)..(1020): n is a, c, g, or t
  misc_feature (1022)..(1022): n is a, c, g, or t
  misc_feature (1025)..(1025): n is a, c, g, or t
ntaagagagaattactatgagaggatcgcatcaccatcaccatcacggatcctatttaggtgacactatagaatcgtcgacccacgcgtccgcaaccggttatggtgctgctgtgaacactgccaagttggagcctggctctgtttgtgccgtctttggtctgggaggagtcggattggcngttatcatgggctgtaaagtggctggtgcttcccggatcattggtgtggacatcaataaagataaatttgcaagggccaaagagtttggagccactgaatgtattaaccctcaggattttagtaaacccatccaggaagtgctcattgagatgaccgatggaggagtggactattcctttgaatgtattggtaatgtgaaggtcatgagagcagcacttgaggcatgtcacaagggctggggcgtcagcgtcgtggttggagtagctgcttcaggtgaanaaattgccactcgtccattccagctggtaacaggtcgcacatggaaaggcactgcctttggaggatggaagagtgtagaaagtgncccaaagttggtgtctgaatatatgtccaaaaagataaaagttgatgaatttgtgactcacaatctgtcttttgatgaaatcaacaaagcctttgaactgatgcattctggaaagagcattcnaactgttgtaaagattttaattccaaaagagaaaaaataatgnccatccctgtcgtgatgtgataggaagcagccttaaccagggcaggggaagaaagcgnccctccnaacctccacangccctcgtaanaagcttcnncaggntactcccanaaaaatagggttaatgggggggccatttccctgaaaancccccaataanccaagggaccaanggaattaatttccagcnccntggaaaccccngttttttctggnaangcccccccccccccnataaaaataaatttggccntaannttttnnttaaaggggaaatattttttttaanccntnaaanaaaaangnaantnttn

SEQ ID NO: 78 - DNA, 936 bp, Homo Sapiens
catcaccatcaccatcacggatcctatttaggtgacactatagaatcgtcgacccacgcgtccgcccacgcgtccggacagattggggtggagcatgtggtggtgtatgtgaacaaggctgacgctgtccaggactctgagatggtggaactggtggaactggagatccgggagctgctcaccgagtttggctataaaggggaggagaccccagtcatcgtaggctctgctctctgtgcccttgagggtcgggaccctgagttaggcctgaagtctgtgcagaagctactggatgctgtggacacttacatcccagtgcccgcccgggacctggagaagcctttcctgctgcctgtggaggcggtgtactccgtccctggccgtggcaccgtggtgacaggtacactagagcgtggcattttaaagaagggagacgagtgtgagctcctaggacatagcaagaacatccgcactgtggtgacaggcattgagatgttccacaagagcctggagagggccgaggccggagataacctcggggccctggtccgaggcttgaagcgggaggacttgcggcggggcctggtcatggtcaagccaggttccatcaagccccaccagaaggtggaggcccaggtttacatcctcagcaaggaggaaggtggccgccacaagccctttgtgtcccacttcatgcctgtcatgttctccctgacttgggacatggcctgtcggattatcctgcccccagagaaggagcttgccatgcccggggaggacctgaagttcaacctaatcttgcggcagccaatgatcttagagaaaggccagcgtttcaccctgcgagatggcaaccggactattggcaccggtctagtcaccaacacgctggccatgactgaggaggagaagaatatcaaatgggggttgagtgtg

SEQ ID NO: 79 - DNA, 948 bp, Homo Sapiens
catcaccatcaccatcacggatcctatttaggtgacactatagaatcgtcgacccacgcgtccggcgcggcccaacctttactccagagatcatggctgccgaggatgtggtggcgactggcgccgacccaagcgatctggagagcggcgggctgctgcatgagattttcacgtcgccgctcaacctgctgctgcttggcctctgcatcttcctgctctacaagatcgtgcgcggggaccagccggcggccagcggcgacagcgacgacgacgagccgccccctctgccccgcctcaagcggcgcgacttcacccccgccgagctgcggcgcttcgacggcgtccaggacccgcgcatactcatggccatcaacggcaaggtgttcgatgtgaccaaaggccgcaaattctacgggcccgaggggccgtatggggtctttgctggaagagatgcatccaggggccttgccacattttgcctggataaggaagcactgaaggatgagtacgatgacctttctgacctcactgctgcccagcaggagactctgagtgactgggagtctcagttcactttcaagtatcatcacgtgggcaaactgctgaaggagggggaggagcccactgtgtactcagatgaggaagaaccaaaagatgagagtgcccggaaaaatgattaaagcattcagtggaagtatatctatttttgtattttgcaaaatcatttgtaacagtccactctgtctttaaaacatagtgattacaatatttagaaagttttgagcacttgctataagttttttaattaacatcactagtgacactaataaaattaacttcttagaatgcatgatgtgtttgtgtgtcacaaatccagaaagtgaactgcagtgctgtaatacacatgttaatactgtttttcttctatctgtagttagtacaggatga

SEQ ID NO: 80 - DNA, 998 bp, Homo Sapiens
  misc_feature (6)..(6): n is a, c, g, or t
  misc_feature (531)..(531): n is a, c, g, or t
  misc_feature (628)..(628): n is a, c, g, or t
  misc_feature (719)..(719): n is a, c, g, or t
  misc_feature (727)..(727): n is a, c, g, or t
  misc_feature (742)..(742): n is a, c, g, or t
  misc_feature (765)..(765): n is a, c, g, or t
  misc_feature (767)..(767): n is a, c, g, or t
  misc_feature (771)..(771): n is a, c, g, or t
  misc_feature (782)..(782): n is a, c, g, or t
  misc_feature (791)..(791): n is a, c, g, or t
  misc_feature (802)..(802): n is a, c, g, or t
  misc_feature (806)..(806): n is a, c, g, or t
  misc_feature (837)..(838): n is a, c, g, or t
  misc_feature (846)..(846): n is a, c, g, or t
  misc_feature (849)..(849): n is a, c, g, or t
  misc_feature (854)..(854): n is a, c, g, or t
  misc_feature (860)..(860): n is a, c, g, or t
  misc_feature (862)..(862): n is a, c, g, or t
  misc_feature (864)..(864): n is a, c, g, or t
  misc_feature (872)..(872): n is a, c, g, or t
  misc_feature (882)..(882): n is a, c, g, or t
  misc_feature (902)..(902): n is a, c, g, or t
  misc_feature (908)..(908): n is a, c, g, or t
  misc_feature (911)..(911): n is a, c, g, or t
  misc_feature (931)..(931): n is a, c, g, or t
  misc_feature (933)..(933): n is a, c, g, or t
  misc_feature (936)..(938): n is a, c, g, or t
  misc_feature (946)..(946): n is a, c, g, or t
  misc_feature (950)..(950): n is a, c, g, or t
  misc_feature (967)..(967): n is a, c, g, or t
  misc_feature (988)..(988): n is a, c, g, or t
  misc_feature (990)..(990): n is a, c, g, or t
  misc_feature (997)..(997): n is a, c, g, or t
tagagnaattaactatgagaggatcgcatcaccatcaccatcacggatcctatttaggtgacactatagaatcgtcgacccacgcgtccgggcccgcccgcgcccgtccgcagccgcccgccagacgcgcccagtatgagggagatcgtgcacatccaggccggccagtgcggcaaccagatcggggccaagttctgggaagtcatcagtgatgagcatggcatcgaccccagcggcaactacgtgggcgactcggacttgcagctggagcggatcagcgtctactacaacgaggcctcttctcacaagtacgtgcctcgagccattctggtggacctggaacccggaaccatggacagtgtccgctcaggggcctttggacatctcttcaggcctgacaatttcatctttggtcagagtggggccggcaacaactgggccaagggtcactacacggagggggcggagctggtggattcggtcctggatgtggtgcggaaggagtgtgaaaactgcgactgcctgcagggnttccagctgacccactcgctggggggcggcacgggctccggcatgggcacgttgctcatcagcaaggtgcgtgaggagtatcccgaccgcatcatgnacaccttcagcgtcgtgccctcacccaaggtgtcagacacggtggtggagccctacaaacgccacgttgtccatccaccagctgggggganaacacggnatgaaaacctactgnatcgacaacgagggggctctacnanattntggtttccggnaccctcaangttgggccacncccnacctaacgggggaactccaaccaccctggtnntcggcccnccnatggnggggantncncccccctnccttttgggnttttcccgggggccaagttnaaaagnttnaacctggggcaaaaggttgngnccnnnaaaaaaangggngggcccttttcccgggnccttggaaatttttttttttngncccgggnt

SEQ ID NO: 81 - DNA, 980 bp, Homo Sapiens
aactatgagaggatcgcatcaccatcaccatcacggatcctatttaggtgacactatagaatcgtcgacccacgcgtccgcggacgcgtgggctgcatactcgctgcccgccggctccctcccccgcgtccctgcgaccgccgcggcgaagatggcctcaggagtgcaagtagctgatgaagtatgtcgcattttttatgacatgaaagttcgtaaatgctccacaccagaagaaatcaagaaaagaaagaaggctgtcattttttgtctcagtgcagacaaaaagtgcatcattgtagaagaaggcaaagagatcttggttggagatgttggtgtaaccataactgatcctttcaagcattttgtgggaatgcttcctgaaaaagattgtcgctatgctttgtatgatgcaagctttgaaacaaaagaatccagaaaagaagagttgatgttttttttgtgggcaccagaactagcacctctgaaaagtaaaatgatctatgcaagctccaaggatgcaattaaaaagaaatttcaaggcataaaacatgaatgtcaagcaaatggaccagaagatctcaatcgggcttgtattgctgaaaagttaggtggatccttaattgtagcctttgaaggatgccctgtgtagattattcagtgccacaaattgaaagcttccatgtttaatgttatcctcttgctatataaataaagcaaatatatttaggccagggtctcactgagggggagctgtcttgtcatcttttagagtaaactattctataaacatatgcaaacagccctaaataaatctaaagtctaaagttttattgatgtgaaattaaattcttattggccaaatgcctgttttgatgagttgatttataaagatttttgttaagctcaggattttaaattacacagttcacaaacagtaaaggccatgtgaagagaattattacatctttattaacctcagc

SEQ ID NO: 82 - DNA, 832 bp, Homo Sapiens
ctatgagaggatcgcatcaccatcaccatcacggatcctatttaggtgacactatagaatcgtcgacccacgcgtccggtactgacaaccacctggtgctggtggacctgcggcccaagggcctggatggagctcgggctgagcgggtgctagagcttgtatccatcactgccaacaagaacacctgtcctggagaccgaagtgccatcacaccgggcggcctgcggcttggggccccagccttaacttctcgacagttccgtgaggatgacttccggagagttgtggactttatagatgaaggggtcaacattggcttagaggtgaagagcaagactgccaagctccaggatttcaaatccttcctgcttaaggactcagaaacaagtcagcgtctggccaacctcaggcaacgggtggagcagtttgccagggccttccccatgcctggttttgatgagcattgaaggcacctgggaaatgaggcccacagactcaaagttactctccttccccctacctgggccagtgaaatagaaagcctttctattttttggtgcgggagggaagacctctcacttagggcaagagccaggtatagtctcccttcccagaatttgtaactgagaagatcttttctttttcctttttttggtaacaagacttagaaggagggcccaggcactttctgtttgaacccctgtcatgatcacagtgtcagagacgcgtcctctttcttggggaagttgaggagtgcccttcagagccagtagcaggcaggggtgggtaggcaccctccttcctgtttttatctaataaaatgctaacctgc

SEQ ID NO: 83 - DNA, 910 bp, Homo Sapiens
catcaccatcaccatcacggatcctatttaggtgacactatagaatcgtcgacccacgcgtccgccggtgccaagcgcagctagctcagcaggcggcagcggcggcctgagcttcagggcagccagctccctcccggtctcgccttccctcgcggtcagcatgaaagccttcagtcccgtgaggtccgttaggaaaaacagcctgtcggaccacagcctgggcatctcccggagcaaaacccctgtggacgacccgatgagcctgctatacaacatgaacgactgctactccaagctcaaggagctggtgcccagcatcccccagaacaagaaggtgagcaagatggaaatcctgcagcacgtcatcgactacatcttggacctgcagatcgccctggactcgcatcccactattgtcagcctgcatcaccagagacccgggcagaaccaggcgtccaggacgccgctgaccaccctcaacacggatatcagcatcctgtccttgcaggcttctgaattcccttctgagttaatgtcaaatgacagcaaagcactgtgtggctgaataagcggtgttcatgatttcttttattctttgcacaacaacaacaacaacaaattcacggaatcttttaagtgctgaacttatttttcaaccatttcacaaggaggacaagttgaatggacctttttaaaaagaaaaaaaaaatggaaggaaaactaagaatgatcatcttcccagggtgttctcttacttggactgtgatattcgttatttatgaaaaagacttttaaatgccctttctgcagttggaaggttttctttatatactattcccaccatggggagcgaaaacgttaaaatcacaaggaattgcccaatctaagcagactttgcctttttcaaagg

SEQ ID NO: 84 - DNA, 613 bp, Homo Sapiens
tagagaaaattactatgagaggatcgcatcaccatcaccatcacggatcctatttaggtgacactatagaatcggtcgacccacgcgtccggcggtggagccgccaccaaaatgcagattttcgtgaaaacccttacggggaagaccatcaccctcgaggttgaaccctcggatacgatagaaaatgtaaaggccaagatccaggataaggaaggaattcctcctgatcagcagagactgatctttgctggcaagcagctggaagatggacgtactttgtctgactacaatattcaaaaggagtctactcttcatcttgtgttgagacttcgtggtggtgctaagaaaaggaagaagaagtcttacaccactcccaagaagaataagcacaagagaaagaaggttaagctggctgtcctgaaatattataaggtggatgagaatggcaaaattagtcgccttcgtcgagagtgcccttctgatgaatgtggtgctggggtgtttatggcaagtcactttgacagacattattgtggcaaatgttgtctgacttactgtttcaacaaaccagaagacaagtaactgtatgagttaataaaagacatgaactacc

SEQ ID NO: 85 - DNA, 662 bp, Homo Sapiens
  misc_feature (654)..(654): n is a, c, g, or t
  misc_feature (656)..(656): n is a, c, g, or t
  misc_feature (662)..(662): n is a, c, g, or t
tagagaaattactatgagaggatcgcatcaccatcaccatcacggatcctatttaggtgacactatagaatcgtcgacccacgcgtccgcccacgcgtccgcccacgcgtccgctcgaaagctgttgagccacggcaaaaaacccttcagtcagcacgtgagaaaactgcgagccagcattacccccgggaccattctgatcatcctcactggacgccacaggggcaagagggtggttttcctgaagcagctggctagtggcttattacttgtgactggacctctggtcctcaatcgagttcctctacgaagaacacaccagaaatttgtcattgccacttcaaccaaaatcgatatcagcaatgtaaaaatcccaaaacatcttactgatgcttacttcaagaagaagaagctgcggaagcccagacaccaggaaggtgagatcttcgacacagaaaaagagaaatatgagattacggagcagcgcaagattgatcagaaagctgtggactcacaaattttaccaaaaatcaaagctattcctcagctccagggctacctgcgatctgtgtttgctctgacgaatggaatttatcctcacaaattggtgttctaaatgtcttaagaacctaattaaatagctgactacaaaananaaaaan

SEQ ID NO: 86 - DNA, 1221 bp, Homo Sapiens
  misc_feature (67)..(67): n is a, c, g, or t
  misc_feature (742)..(742): n is a, c, g, or t
  misc_feature (834)..(834): n is a, c, g, or t
  misc_feature (849)..(849): n is a, c, g, or t
  misc_feature (891)..(891): n is a, c, g, or t
  misc_feature (907)..(907): n is a, c, g, or t
  misc_feature (951)..(951): n is a, c, g, or t
  misc_feature (957)..(957): n is a, c, g, or t
  misc_feature (1005)..(1005): n is a, c, g, or t
  misc_feature (1008)..(1008): n is a, c, g, or t
  misc_feature (1027)..(1027): n is a, c, g, or t
  misc_feature (1047)..(1047): n is a, c, g, or t
  misc_feature (1056)..(1056): n is a, c, g, or t
  misc_feature (1067)..(1067): n is a, c, g, or t
  misc_feature (1072)..(1072): n is a, c, g, or t
  misc_feature (1085)..(1085): n is a, c, g, or t
  misc_feature (1087)..(1087): n is a, c, g, or t
  misc_feature (1100)..(1101): n is a, c, g, or t
  misc_feature (1106)..(1106): n is a, c, g, or t
  misc_feature (1112)..(1112): n is a, c, g, or t
  misc_feature (1116)..(1116): n is a, c, g, or t
  misc_feature (1120)..(1120): n is a, c, g, or t
  misc_feature (1128)..(1129): n is a, c, g, or t
  misc_feature (1138)..(1138): n is a, c, g, or t
  misc_feature (1148)..(1148): n is a, c, g, or t
  misc_feature (1152)..(1152): n is a, c, g, or t
  misc_feature (1156)..(1156): n is a, c, g, or t
  misc_feature (1160)..(1162): n is a, c, g, or t
  misc_feature (1167)..(1167): n is a, c, g, or t
  misc_feature (1180)..(1180): n is a, c, g, or t
  misc_feature (1183)..(1183): n is a, c, g, or t
  misc_feature (1189)..(1189): n is a, c, g, or t
  misc_feature (1191)..(1191): n is a, c, g, or t
  misc_feature (1198)..(1200): n is a, c, g, or t
  misc_feature (1212)..(1212): n is a, c, g, or t
  misc_feature (1217)..(1217): n is a, c, g, or t
  misc_feature (1219)..(1219): n is a, c, g, or t
agagaaattactatgagaggatcgcatcaccatcaccatcacggatcctatttaggtgacactatanaatcgtcgacccacgcgtccgcgcccgcgcccgtccgcagccgcccgccagacgcgcccagtatgagggagatcgtgcacatccaggccggccagtgcggcaaccagatcggggccaagttctgggaagtcatcagtgatgagcatggcatcgaccccagcggcaactacgtgggcgactcggacttgcagctggagcggatcagcgtctactacaacgaggcctcttctcacaagtacgtgcctcgagccattctggtggacctggaacccggaaccatggacagtgtccgctcaggggcctttggacatctcttcaggcctgacaatttcatctttggtcagagtggggccggcaacaactgggccaagggtcactacacggagggggcggagctggtggattcggtcctggatgtggtgcggaaggagtgtgaaaactgcgactgcctgcagggcttccagctgacccactcgctggggggcggcacgggctccggcatgggcacgttgctcatcagcaaggtgcgtgaggagtatcccgaccgcatcatgaacaccttcagcgtcgtgccctcacccaaggtgtcagacacggtggtggagccctacaacgccacgctgtccatccaccagctggtggagaacacggatgagacctactgcatcgacaacnaggcgctctacgacatctgcttccgcaccctcaagctggccacgcccacctacggggaacctcaaccacctggtatcggccaccatgagcgnagtcccacctccttngcgcttcccgggccagctcaacgctgacctgcgcaagctggnccgttcaacatggtgnccctttcccgcgcctgcacttcttcatgcccggcttcgcccccntcaaangcccgggggcagccagcaagtaccgggccctgaccgtgcccgaactcnccnagcaaaattttccatgccnaaaaaaatgatggccgcctngcaaccggncccggcccctnacttnaagggggcccccntnttccggggccccnnttccnttaaanaggngganaaaaaatnnttgccttcnaaaaaaaaanacantttncttnnngaatngaattccccaaanggngaaggngngccgtgnnnaaattccccccngggcntnaa

SEQ ID NO: 87 - DNA, 841 bp, Homo Sapiens
  misc_feature (1)..(1): n is a, c, g, or t
  misc_feature (3)..(3): n is a, c, g, or t
  misc_feature (685)..(685): n is a, c, g, or t
  misc_feature (707)..(707): n is a, c, g, or t
  misc_feature (730)..(730): n is a, c, g, or t
  misc_feature (734)..(734): n is a, c, g, or t
  misc_feature (755)..(755): n is a, c, g, or t
  misc_feature (769)..(769): n is a, c, g, or t
  misc_feature (784)..(784): n is a, c, g, or t
  misc_feature (788)..(789): n is a, c, g, or t
  misc_feature (803)..(803): n is a, c, g, or t
  misc_feature (806)..(806): n is a, c, g, or t
  misc_feature (827)..(827): n is a, c, g, or t
nanctatgagaggatcgcatcaccatcaccatcacggatcctatttaggtgacactatagaatcgtcgacccacgcgtccgcccacgcgtccgcagagaagtggatccgccgcttgcgccgcatggagtccgaatcggaaagcggggctgctgctgacacccccccactggagaccctaagcttccatggtgatgaagagattatcgaggtggtagaacttgatcccggtccgccggacccagatgacctggcccaggagatggaagatgtggactttgaggaagaagaggaggaagagggcaacgaagagggctgggttctagaaccccaggaaggggtggtcggcagcatggagggccccgacgatagcgaggtcacctttgcattgcactcagcatctgtgttttgtgtgagcctggaccccaagaccaataccttggcagtgaccgggggtgaagatgacaaagccttcgtatggcggctcagcgatggggagctgctctttgagtgtgcaggccataaagactctgtgacttgtgctggtttcagccatgactccactctagtggccacaggggacatgagtggcctcttgaaagtgtggcaggtggacactaaggaggaggtctggtcctttgaagcgggagacctggagtggatggagtggcatcctcgggcacctgncctgttggcggccacagctganggcaacccctggatgtggaaagncccnatggggactgcaagaccttcnggggtcccaactgnccagccacctgtggncganncctcccttgatggnaanaaaactggggaaggcttatgnaaaagggacccttc

SEQ ID NO: 88 - DNA, 1203 bp, Homo Sapiens
  misc_feature (957)..(957): n is a, c, g, or t
  misc_feature (967)..(967): n is a, c, g, or t
  misc_feature (1002)..(1002): n is a, c, g, or t
  misc_feature (1022)..(1022): n is a, c, g, or t
  misc_feature (1025)..(1025): n is a, c, g, or t
  misc_feature (1039)..(1039): n is a, c, g, or t
  misc_feature (1055)..(1055): n is a, c, g, or t
  misc_feature (1070)..(1070): n is a, c, g, or t
  misc_feature (1075)..(1075): n is a, c, g, or t
  misc_feature (1083)..(1083): n is a, c, g, or t
  misc_feature (1086)..(1086): n is a, c, g, or t
  misc_feature (1095)..(1095): n is a, c, g, or t
  misc_feature (1099)..(1099): n is a, c, g, or t
  misc_feature (1114)..(1114): n is a, c, g, or t
  misc_feature (1142)..(1142): n is a, c, g, or t
  misc_feature (1144)..(1144): n is a, c, g, or t
  misc_feature (1148)..(1148): n is a, c, g, or t
  misc_feature (1153)..(1153): n is a, c, g, or t
  misc_feature (1157)..(1157): n is a, c, g, or t
  misc_feature (1175)..(1177): n is a, c, g, or t
  misc_feature (1192)..(1193): n is a, c, g, or t
  misc_feature (1203)..(1203): n is a, c, g, or t
tagagaaattactatgagaggatcgcatcaccatcaccatcacggatcctatttaggtgacactatagaatcgtcgacccacgcgtccgcggagcagagtcgactgggagcgaccgagcgggccgccgccgccgccatgaaccccgaatatgactacctgtttaagctgcttttgattggcgactcaggcgtgggcaagtcatgcctgctcctgcggtttgctgatgacacgtacacagagagctacatcagcaccatcggggtggacttcaagatccgaaccatcgagctggatggcaaaactatcaaacttcagatctgggacacagcgggccaggaacggttccggaccatcacttccagctactaccggggggctcatggcatcatcgtggtgtatgacgtcactgaccaggaatcctacgccaacgtgaagcagtggctgcaggagattgaccgctatgccagcgagaacgtcaataagctcctggtgggcaacaagagcgacctcaccaccaagaaggtggtggacaacaccacagccaaggagtttgcagactctctgggcatccccttcttggagacgagcgccaagaatgccaccaatgtcgagcaggcgttcatgaccatggctgctgaaatcaaaaagcggatggggcctggagcagcctctgggggcgagcggcccaatctcaagatcgacagcacccctgtaaagccggctggcggtggctgttgctaggaggggcacatggagtgggacaggagggggcaccttctccagatgatgtccctggagggggcaggaggtacctccctctccctctcctggggcatttgagtctgtggctttggggtgtcctgggctccccatctccttctggcccatctgcctgctgccctgagcccggttctgtcagggtccctaagggaggacactcagggcctgtggccagncagggcggangcctgctgtgctgttgcctctaggtgacttccaanatgcccccctaccccctttnttngaacgaggctcttntgtcggtgtccctccnccccatgttgctgcntgggntctccctnctnttctggtgnctgncaaaaatgagggttncccggccttaatgcctggtgcatcatgncnaggnaaaantggncagggatcagaactggannnggcctgggtggactnngaaaggtggn

SEQ ID NO: 89 - DNA, 1185 bp, Homo Sapiens
  misc_feature (865)..(865): n is a, c, g, or t
  misc_feature (922)..(922): n is a, c, g, or t
  misc_feature (926)..(926): n is a, c, g, or t
  misc_feature (990)..(990): n is a, c, g, or t
  misc_feature (992)..(992): n is a, c, g, or t
  misc_feature (1002)..(1002): n is a, c, g, or t
  misc_feature (1007)..(1007): n is a, c, g, or t
  misc_feature (1009)..(1009): n is a, c, g, or t
  misc_feature (1011)..(1011): n is a, c, g, or t
  misc_feature (1020)..(1020): n is a, c, g, or t
  misc_feature (1028)..(1028): n is a, c, g, or t
  misc_feature (1041)..(1041): n is a, c, g, or t
  misc_feature (1049)..(1049): n is a, c, g, or t
  misc_feature (1060)..(1060): n is a, c, g, or t
  misc_feature (1079)..(1079): n is a, c, g, or t
  misc_feature (1082)..(1082): n is a, c, g, or t
  misc_feature (1092)..(1092): n is a, c, g, or t
  misc_feature (1098)..(1098): n is a, c, g, or t
  misc_feature (1102)..(1102): n is a, c, g, or t
  misc_feature (1110)..(1110): n is a, c, g, or t
  misc_feature (1114)..(1114): n is a, c, g, or t
  misc_feature (1121)..(1121): n is a, c, g, or t
  misc_feature (1123)..(1123): n is a, c, g, or t
  misc_feature (1130)..(1130): n is a, c, g, or t
  misc_feature (1133)..(1133): n is a, c, g, or t
  misc_feature (1135)..(1135): n is a, c, g, or t
  misc_feature (1140)..(1140): n is a, c, g, or t
  misc_feature (1162)..(1162): n is a, c, g, or t
  misc_feature (1166)..(1166): n is a, c, g, or t
  misc_feature (1171)..(1171): n is a, c, g, or t
  misc_feature (1173)..(1173): n is a, c, g, or t
  misc_feature (1184)..(1184): n is a, c, g, or t
gagaaattactatgagaggatcgcatcaccatcaccatcacggatcctatttaggtgacactatagaatcgtcgacccacgcgtccgcccacgcgtccgaggaggccgacttagccggtggcacgacagttgctgcagggaatcttttaaacgagagcgagaaggactgcgggcaggaccggcgggctcctggggttcagccgtgcctcctcgttacgatgaccagtgtggttaagacagtgtatagcctgcagccctcctctgcgctgagcggcggccagccggcagacacacaaactcgggccacttctaagagtctcttacctgttaggtccaaagaagtcgatgtttccaaacagcttcattcaggaggtccagagaatgatgttacaaaaatcaccaaactgagacgagagaatgggcaaatgaaagctactgacactgccaccagaaggaatgtcagaaaaggctacaaaccactgagtaagcaaaaatcagaggaagagctcaaggacaagaaccagctgttagaagccgtcaacaagcagttgcaccagaagttgactgaaactcagggagagctgaaggacctgacccagaaggtagagctgctggagaagtttcgggacaactgtttggcaattttggagagcaagggccttgatccagctttaggcggtgagaccctggcatcacgacaagaatccactactgatcacatggactctatgttgctgttagaaactttgcaagaggagctgaagctttttaacgaaacagccaaaaagcagatggaggagttacaggccttaaaggtaaagctggagatgaaagaggaaagagtccgattcctagaacagcaaanccttatgtaacaatcaagtaatgatttaacaacagcccttaaggaatggagcagctnttanaatgtaaaaaaagcaagtggccagatggctccctctgggcataaatcccaaagagctacttagnantctcttggcntgatntncnggactcccntctccaantgaaacaatttcnccgtaaanttaggacgttntgctgaatggcattcctcnttnagcagttttncccacnttcnggtggtcncccnctgaccncnggggganatngngcccnaaaaaagggacctaggacttgnttgnctttntnccccctgattnc

SEQ ID NO: 90 - DNA, 1145 bp, Homo Sapiens
  misc_feature (721)..(721): n is a, c, g, or t
  misc_feature (800)..(800): n is a, c, g, or t
  misc_feature (808)..(808): n is a, c, g, or t
  misc_feature (820)..(820): n is a, c, g, or t
  misc_feature (822)..(822): n is a, c, g, or t
  misc_feature (825)..(825): n is a, c, g, or t
  misc_feature (836)..(836): n is a, c, g, or t
  misc_feature (854)..(854): n is a, c, g, or t
  misc_feature (856)..(856): n is a, c, g, or t
  misc_feature (864)..(864): n is a, c, g, or t
  misc_feature (874)..(874): n is a, c, g, or t
  misc_feature (878)..(878): n is a, c, g, or t
  misc_feature (884)..(884): n is a, c, g, or t
  misc_feature (889)..(889): n is a, c, g, or t
  misc_feature (916)..(916): n is a, c, g, or t
  misc_feature (922)..(922): n is a, c, g, or t
  misc_feature (949)..(949): n is a, c, g, or t
  misc_feature (953)..(953): n is a, c, g, or t
  misc_feature (964)..(964): n is a, c, g, or t
  misc_feature (976)..(976): n is a, c, g, or t
  misc_feature (993)..(993): n is a, c, g, or t
  misc_feature (995)..(995): n is a, c, g, or t
  misc_feature (998)..(998): n is a, c, g, or t
  misc_feature (1007)..(1007): n is a, c, g, or t
  misc_feature (1017)..(1017): n is a, c, g, or t
  misc_feature (1026)..(1026): n is a, c, g, or t
  misc_feature (1035)..(1036): n is a, c, g, or t
  misc_feature (1038)..(1038): n is a, c, g, or t
  misc_feature (1051)..(1051): n is a, c, g, or t
  misc_feature (1060)..(1060): n is a, c, g, or t
  misc_feature (1062)..(1062): n is a, c, g, or t
  misc_feature (1069)..(1069): n is a, c, g, or t
  misc_feature (1075)..(1075): n is a, c, g, or t
  misc_feature (1078)..(1078): n is a, c, g, or t
  misc_feature (1082)..(1082): n is a, c, g, or t
  misc_feature (1095)..(1095): n is a, c, g, or t
  misc_feature (1102)..(1102): n is a, c, g, or t
  misc_feature (1105)..(1106): n is a, c, g, or t
  misc_feature (1111)..(1113): n is a, c, g, or t
  misc_feature (1128)..(1128): n is a, c, g, or t
  misc_feature (1136)..(1136): n is a, c, g, or t
  misc_feature (1138)..(1139): n is a, c, g, or t
  misc_feature (1142)..(1143): n is a, c, g, or t
tagagaaattactatgagaggatcgcatcaccatcaccatcacggatcctatttaggtgacactatagaatcgtcgacccacgcgtccgcccacgcgtccgagaaaggaaccaagcgagcagtggccactaagtttgtgaacaagaagttgatgaagcgcgaccaggtcacccatgagcttggcatcctgcagagcctccagcaccccctgcttgtcggcctcctcgacacctttgagacccccaccagctacatcctggtcttagaaatggctgaccagggtcgcctcctggactgcgtggtgcgatggggaagcctcactgaagggaagatcagggcgcacctgggggaggttctggaagctgtccggtacctgcacaactgcaggatagcacacctggacctaaagcctgagaatatcctggtggatgagagtttagccaagccaaccatcaaactggctgactttggagatgctgttcagctcaacacgacctactacatccaccagttactggggaaccctgaattcgcagcccctgaaatcatcctcgggaaccctgtctccctgacctcggatacgtggagtgttggagtgctcacatacgtacttcttagtggcgtgtcccccttcctggatgacagtgtggaagagacctgcctgaacatttgccgcttagactttagcttcccagatgactactttaaaggagtgagccanaaggccaaggagttcgtgtgcttcctcctgcaggaggaccccgccaagcgtccctcggctgcgctggccctccaaggancagtggcntgcaaggcccgncnacnggcaataagcncggggccgtcctcgaacncnttccaganttgacttccnttcnttgagngggcngcaaacaccagaaatgatgttcgaacntatccntagcattaaaaactttctgccaaagcnaggnttctgccctanaatttgaacttntccaaaaattcttttcncnttntctttcacntgccaatcanttttttatntgaaatttnngnaaaaacaggcaancttaactgntnccctgcnggttgngtncccngggggaaattgcnttccaanggnnttggnnncaaaatgtttgaaanaaaatttnannttnnct

SEQ ID NO: 91 - DNA, 957 bp, Homo Sapiens
atgagaggatcgcatcaccatcaccatcacggatcctatttaggtgacactatagaatcgtcgacccacgcgtccggccgcgacaaggcctcagacgccagcgacaagcagcgccaggaggcccgcaagagactcctggcggccaagcgggcagcttctgtgcggcagaactcagccaccgagagcgcagacagcatcgagatttatgtcccggaggcccagaccaggctctgagaccatgcaggaggaaagaaacgattttaaatcattaaaaacacaaaaactaagtgcgaacggaacagagttttctcaacctttgctatggttattctgtctagagaccctgagccaactttcaaattgacgcatacaagggctcacaatttggcttttttgggtccctcccagctttaggttatgaagattttactcacaaaaaaaaaaaaaaaaaaaagggcggccgctccctatagtgagtcgtattaagcttaattagctgagcttggactcctgttgatagatccagtaatgacctcagaactccatctggatttgttcagaacgctcggttgccgccgggcgttttttattggtgagaatccaagctagcttggcgagattttcaggagctaaggaagctaaaatggagaaaaaaatcactggatataccaccgttgatatatcccaatggcatcgtaaagaacattttgaggcatttcagtcagttgctcaatgtacctataaccagaccgttcagctggatattacggcctttttaaagaccgtaaagaaaaataagcacaagttttatccggcctttattcacattcttgcccgcctgatgaatgctcatccggaatttcgtatggcaatgaaagacggtgagctggtgatatgggatagtgttcacccttgttacaccgttttccatgagcaaactgaaacgttttcatcgct

SEQ ID NO: 92 - DNA, 939 bp, Homo Sapiens
atgagaggatcgcatcaccatcaccatcacggatcctatttaggtgacactatagaatcgtcgacccacgcgtccggcgggagcggagagcggaccccagagagccctgagcagccccaccgccgccgccggcctagttaccatcacaccccgggaggagccgcagctgccgcagccggccccagtcaccatcaccgcaaccatgagcagcgaggccgagacccagcagccgcccgccgccccccccgccgcccccgccctcagcgccgccgacaccaagcccggcactacgggcagcggcgcagggagcggtggcccgggcggcctcacatcggcggcgcctgccggcggggacaagaaggtcatcgcaacgaaggttttgggaacagtaaaatggttcaatgtaaggaacggatatggtttcatcaacaggaatgacaccaaggaagatgtatttgtacaccagactgccataaagaagaataaccccaggaagtaccttcgcagtgtaggagatggagagactgtggagtttgatgttgttgaaggagaaaagggtgcggaggcagcaaatgttacaggtcctggtggtgttccagttcaaggcagtaaatatgcagcagaccgtaaccattatagacgctatccacgtcgtaggggtcctccacgcaattaccagcaaaattaccagaatagtgagagtggggaaaagaacgagggatcggagagtgctcccgaaggccaggcccaacaacgccggccctaccgcaggcgaaggttccaccttactacatgcggagaccctatgggcgtcgaccacagtattccaaccctcctgtgcagggagaagtgatggagggtgctgacaaccagggtgcaggagaacaaggtagaccagtgaggcagaatatgtatcggggatatagaccacgattccgc

SEQ ID NO: 93 - DNA, 950 bp, Homo Sapiens
atgagaggatcgcatcaccatcaccatcacggatcctatttaggtgacactatagaatcgtcgacccacgcgtccgagcacgcaaccttcgaggacatccttggtatgtgcctcattggccttctctctgctggttccaggcctgggaggggcagacacaggtgggggtgcccctggggctggggtgggggccgcagcactcacacccgctctcccacagaggagatagagaggaagctgaacgtctaccacaagggagccaagatctggaaaatgctgattttctgccagggaggtcctggacacctctatctcctcaagaacaaggtggccacctttgccaaagtggagaaggaagaggacatgattcacttctggaagcggctgagccgcctgatgagcaaagtgaacccagagccgaacgtcatccacatcatgggctgctacattctggggaaccccaatggagagaagctgttccagaacctcaggaccctcatgactccttatagggtcaccttcgagtcacccctggagctctcagcccaagggaagcagatgatcgagacgtactttgacttccggttgtatcgcctgtggaagagccgccagcactcgaagctgctggactttgacgacgtcctgtgaggggcagaggcctccgcccagtcaccatcaggccactccctctgcaccgggacctggggctgggccgcctcgtgctccccgggactgtgtggctccggtctcgcctggagccacttcagggcacctcagacgttgctcaggttccccctgtgggttccggtcctcgctgcacccgtggccgcagaggctgcagtccctgggggccgggaggatcccgccctgtggcccgtggatgctcagcggccaggcactgacctgccatgcctcgcctggaggctcagctgtggcatccctccatgggg

SEQ ID NO: 94 - DNA, 811 bp, Homo Sapiens
  misc_feature (2)..(2): n is a, c, g, or t
  misc_feature (766)..(766): n is a, c, g, or t
  misc_feature (787)..(788): n is a, c, g, or t
cnatgagaggatcgcatcaccatcaccatcacggatcctatttaggtgacactatagaatcgtcgacccacgcgtccgcccacgcgtccgctttggaaaagaaaaccattgagtgggctgaagagattaagaaaatcgaagaagccgagcgggaagcagagtgcaaaattgcggaagcagaagctaaagtgaattctaagagtggcccagagggcgatagcaaaatgagcttctccaagactcacagtacagccacaatgccacctcctattaaccccatcctcgccagcttgcagcacaacagcatcctcacaccaactcgggtcagcagtagtgccacgaaacagaaagttctcagcccacctcacataaaggcggatttcaatcttgctgactttgagtgtgaagaagacccatttgataatctggagttaaaaactattgatgagaaggaagagctgagaaatattctggtaggaaccactggacccattatggctcagttattggacaataacttgcccaggggaggctctgggtctgtgttacaggatgaggaggtcctggcatccttggaacgggcaaccctagatttcaagcctcttcataaacccaatggctttataacccttaccacagttgggcaactgtgaaaagatgtcactgtcttccaaagtgtccctcccccctatacctgcagtaagcaatatcaaatccctgtctttccccaaacttgactctgatgacagcatcagaagacagccangctggcgagcactttccatannacatcctgcctccgcaatggcac

SEQ ID NO: 95 - DNA, 831 bp, Homo Sapiens
  misc_feature (4)..(4): n is a, c, g, or t
  misc_feature (9)..(10): n is a, c, g, or t
  misc_feature (812)..(812): n is a, c, g, or t
  misc_feature (823)..(823): n is a, c, g, or t
taanagggnnaattaactatgagaggatcgcatcaccatcaccatcacggatcctatttaggtgacactatagaatcgtcgacccacgcgtccgattctccgagtcagattggagcatttgtgttgatgaagatgaaagagactgcagaaaattacttggggcacacagcaaaaaatgctgtgatcacagtcccagcttatttcaatgactcgcagagacaggccactaaagatgctggccagatatctggactgaatgtgcttcgggtgattaatgagcccacagctgctgctcttgcctatggtctagacaaatcagaagacaaagtcattgctgtatatgatttaggtggtggaacttttgatatttctatcctggaaattcagaaaggagtatttgaggtgaaatccacaaatggggataccttcttaggtggggaagactttgaccaggccttgctacggcacattgtgaaggagttcaagagagagacaggggttgatttgactaaagacaacatggcacttcagagggtacgggaagctgctgaaaaggctaaatgtgaactctcctcatctgtgcagactgacatcaatttgccctatcttacaatggattcttctggacccaagcatttgaatatgaagttgacccgtgctcaatttgaagggattgtcactgatctaatcagaaggactatcgctccatgccaaaaagctatgcaagatgcagaagtcagcaagagtgacataggagaagtgattcttgtggggggcatgactaggatgcccaaggttcagcagactgtacnggatctttttnggcagagc

SEQ ID NO: 96 - DNA, 937 bp, Homo Sapiens
  misc_feature (845)..(845): n is a, c, g, or t
  misc_feature (873)..(873): n is a, c, g, or t
  misc_feature (914)..(914): n is a, c, g, or t
  misc_feature (922)..(922): n is a, c, g, or t
taagagaaattactatgagaggatcgcatcaccatcaccatcacggatcctatttaggtgacactatagaatcgtcgacccacgcgtccgcttcttgggaatacaattgtctaactttttatttttggtctggctgttgtggtgtgcaaaactccgtacattgctattttgccacactgcaacaccttacagatgtggaagatgtgaaatttgtcatcaattatgactaccctaactcctcagaggattatattcatcgaattggaagaactgctcgcagtaccaaaacaggcacagcatacactttctttacacctaataacataaagcaagtgagcgaccttatctctgtgcttcgtgaagctaatcaagcaattaatcccaagttgcttcagttggtcgaagacagaggttcaggtcgttccaggggtagaggaggcatgaaggatgaccgtcgggacagatactctgcgggcaaaaggggtggatttaatacctttagagacagggaaaattatgacagaggttactctagcctgcttaaaagagattttggggcaaaaactcagaatggtgtttacagtgctgcaaattacaccaatgggagctttggaagtaattttgtgtctgctggtatacagaccagttttaggactggtaatccaacagggacttaccagaatggttatgatagcactcagcaatacggaagtaatgttccaaatatgcacaatggtatgaaccaacaggcatatgcatatcctgctactgcagctgcacctatgattggttatccaatgccaacaggatattcccaataagactttagaagtatatgtaaatgnctgttttttcataattgctctttatatngggggttatctgacaagatagttatttaagaaaacatgggnaattgcanaaatgactgcagtgc

SEQ ID NO: 97 - DNA, 908 bp, Homo Sapiens
  misc_feature (10)..(11): n is a, c, g, or t
  misc_feature (906)..(908): n is a, c, g, or t
cccgcccttnnagcggatactatgaaggatgcatcaccatcaccatcacggtcgacccacgcgtccgctcgggccgggctgcgtgagggaggagggttcatcatgcctagtggcgtataagaagaccccgccaccggtccctccacgcaccacttcaaagccgttcatctcagtcacagtccagagcagtactgagtctgcccaggacacctacctggacagccaggaccacaagagcgaggtgactagccagtcgggcctgagcaactcgtcggacagcctggacagcagtacccgaccgcccagcgtgacacggggtggagtcgccccagcccctgaggccccagagccacccccaaaacatgcagctctgaaaagtgaacaagggacgctgaccagctctgagtcccaccccgaggccgccccccaaaggaaactgtcatcgataggaatacaagttgactgcattcagccagtgccaaaagaggagcccagtcccgctaccaaattccagtccatcggggttcaggtagaaggacgactggcgaaacagcgtcccctctcacagtatgtcctcccgacgggacacagactcggatacccaggatgccaatgactcaaggtggaatcattctagaaggagatccccggatggaaccctcccccaactccatcaaaattcatggccggtccccgcagccccccaaaaatgccccaatcaagcgcaactcctcccatggagaacacagcgactggacccttaaagggttcttcctggccccacccgacccctggttccagacccctccagattcccaacaaagacggaccaaccaggggctggcccccaaaccgcccaccgggtcctaaagtctttggcagcaaaaacccaatcccctattcggnnn

SEQ ID NO: 98 - DNA, 1337 bp, Homo Sapiens
  misc_feature (16)..(23): n is a, c, g, or t
  misc_feature (595)..(595): n is a, c, g, or t
  misc_feature (597)..(598): n is a, c, g, or t
ccccctcacatttccnnnnnnnngcgcccctctccttgcaatactatgaagatgcatcaccatcaccatcacggtcgacccacgcgtccggggcagggccggcgcggcccggccatggagtcctacgacatcatcgccaaccagcctgtggtcatcgacaacggttcgggggtgattaaagctggctttgcaggagaccagattcccaaatactgtttcccaaactatgtcgggcggccgaagcacatgcgggtgatggctggagccctggagggggacctcttcatcggaccaaaagcagaggagcaccgggggctgctgaccatccgctaccccatggagcacggcgtggtgcgagactggaacgacatggaacgcatctggcagtacgtctactccaaggatcagctgcagaccttctcggaggagcatcctgtgctcctcacggaggccccgctcaacccgagtaagaaccgggagaaggcggcagaggtgttctttgagaccttcaacgtgccggccctgttcatctccatgcaggctgtgctcagtctgtacgcaacaggacgcacgacaggagtggttctagactcangnngacgggtcactcatgctgtgcccatctatgagggctttgccatgcctcactccatcatgcgggtggacattgccggccgcgacgtctcccgctacctccgactcctgctgcgcaaggaaggggttgacctcataactcggctgaatttgaagttgcccggaacatcaaaaagggacggggttactgtcccatcaccccccaaagaataaggccctggaaaagaaaaagggcgaatacccgtgcccaaaggaaaacgccttgatgggggccctggccaatcccaggcccccaatctgtttttccccccgaccctttgggggagaaaaaaaacggccccccaagaggggggccctccaccaaaaaaaactcaaatggacccctcccgaatccttttccccacacagcgccccacgggggcacaacctctaaggagtccggaacccaatctccccagacgtcacaacttcccccccaagaacccaacacctaaccccccccccccaaaacgcttcctcccaccaaaatgacgcctccctccctcccccccggaacaattcacaaaagcgaggccccaaccagcacccaaagatcgccctcccaccacccctcaaaatcaatactcacccccaccactccactctcataaaccaactagttcatccaccccccctccctcatcagccctacgatataccacctactcgccacctcacccgagcaaactccactcctcttcaac

SEQ ID NO: 99 - DNA, 1356 bp, Homo Sapiens
  misc_feature (1)..(1): n is a, c, g, or t
  misc_feature (12)..(12): n is a, c, g, or t
  misc_feature (652)..(653): n is a, c, g, or t
  misc_feature (964)..(964): n is a, c, g, or t
nccgcacacgcntttaagagatactatagaggatgcatcaccatcaccatcacggtcgacccacgcgtccggctgcgctcagcaaagcctttaaagtgaagccatttgtcgtccgagatgcagtggtctaccccatcctggtggagttcacgagggaggtggaggaggagcctgggattcacagcctgaagcacaataaacgggtactcttctctcggatggggccctaccctcaacgcaaagtcatcacctttaaccgctacagccatgatttcaacttccacatcaactacggcgacctgggcttcctggggcctgaagatcttcgggtatttggctcccagaatctgaccacagtgaagctaaaaggggtgggtgacagcttcaagaagtatcctgactacgagtccaagggcatcaaggctcacttcaacctggatgagagtggcgtgctcagtctagacagggtggagtctgtatttgagacactggtagaggacagcgcagaagaggaatctactctcaccaaacttggcaacaccatttccagcctgtttggaggcggtaccacaccagatgccaaggagaatggtactgatactgtccaggaggaagaggagagccctgcagaggggagcaaggacgagcctgnnggagcaggtggagctcaaggaggaagctgaggccccagtgggaggatggctctcagcccccaccccctgaacctaagggagatgcaacccctgaggggagaaaggccacagaaaaagaaaatggggacaagtctgaggcccagaaaccaagtgagaaagcagaggcagggccctgagggcgtcgctccagccccagaagggagagaagaagcagaagcccgccaggaagcggcgaatggtaaaggaaaaatccggtggaaactggttgttcctggacctgcccgacttgccaaaagaataactgggttcantcggggcaaaaacttcaggaacttgacctccgagaactggaaaaaccaggaacggaaaaagcttcccacagccttggaaacattcctatttggaacccggaaaagttgtaccccccccaaaccccgaaagggccccaaaagaacaaccggagggaaactttgggaattcaacgccgcctcccctggctggaggattaaggtgtttaacccccccgggatgttaacgaaaactcgcttaacctgagaactttttcccaggtttttttttcggtagaggacgctaaattagcctcacgacctctcccccccaatacctccccctttctccctggtcttccgggaacccgaccctccccagagcacactctctctgcgtggggcacacgctacag

SEQ ID NO: 100 - DNA, 949 bp, Homo Sapiens
  misc_feature (479)..(479): n is a, c, g, or t
  misc_feature (564)..(564): n is a, c, g, or t
  misc_feature (636)..(636): n is a, c, g, or t
  misc_feature (693)..(693): n is a, c, g, or t
  misc_feature (718)..(718): n is a, c, g, or t
  misc_feature (731)..(731): n is a, c, g, or t
  misc_feature (745)..(745): n is a, c, g, or t
  misc_feature (760)..(760): n is a, c, g, or t
  misc_feature (776)..(776): n is a, c, g, or t
  misc_feature (786)..(786): n is a, c, g, or t
  misc_feature (789)..(789): n is a, c, g, or t
  misc_feature (809)..(809): n is a, c, g, or t
  misc_feature (813)..(813): n is a, c, g, or t
  misc_feature (819)..(819): n is a, c, g, or t
  misc_feature (826)..(826): n is a, c, g, or t
  misc_feature (834)..(834): n is a, c, g, or t
  misc_feature (837)..(837): n is a, c, g, or t
  misc_feature (839)..(839): n is a, c, g, or t
  misc_feature (841)..(842): n is a, c, g, or t
  misc_feature (850)..(850): n is a, c, g, or t
  misc_feature (858)..(858): n is a, c, g, or t
  misc_feature (860)..(861): n is a, c, g, or t
  misc_feature (874)..(874): n is a, c, g, or t
  misc_feature (879)..(879): n is a, c, g, or t
  misc_feature (884)..(885): n is a, c, g, or t
  misc_feature (893)..(893): n is a, c, g, or t
  misc_feature (895)..(895): n is a, c, g, or t
  misc_feature (899)..(899): n is a, c, g, or t
  misc_feature (906)..(906): n is a, c, g, or t
  misc_feature (908)..(908): n is a, c, g, or t
  misc_feature (916)..(916): n is a, c, g, or t
  misc_feature (926)..(926): n is a, c, g, or t
  misc_feature (929)..(929): n is a, c, g, or t
  misc_feature (949)..(949): n is a, c, g, or t
atagagagattactatgagaggatcgcatcaccatcaccatcacggatcctatttaggtgacactatagaatcgtcgacccacgcgtccgcgggagcggagagcggaccccagagagccctgagcagccccaccgccgccgccggcctagttaccatcacaccccgggaggagccgcagctgccgcagccggccccagtcaccatcaccgcaaccatgagcagcgaggccgagacccagcagccgcccgccgccccccccgccgcccccgccctcagcgccgccgacaccaagcccggcactacgggcagcggcgcagggagcggtggcccgggcggcctcacatcggcggcgcctgccggcggggacaagaaggtcatcgcaacgaaggttttgggaacagtaaaatggttcaatgtaaggaacggatatggtttcatcaacaggaatgacaccaaggaagatgtatttgtacaccanactgccataaagaagaataaccccaggaagtaccttcgcagtgtaggagatggagagactgtggagtttgatgttgttgaagganaaaagggtgcggaggcagcaaatgttacaggtcctggtggtgttccagttcaaggcagtaaatatgcagcanaccgtaatcattatagacgctatccacgtcgtaggggtcctccacgcaattaccagnaaaattaccagaatagtgagagtgnggaaaaaaacgangggatcggaaatgnttcccgaaagccagntcaaaaaacgccgggncctatcgcangcnaaagtttcccaccttactanatgnggaaanccctatngggcgtcnacnanannattccaanccttcctntnnaaggaaaaattgntgganggatnntaaacaancnaggnttcctgnanaaaaaggnaaaccagtgnatnaaaaatatttatcggggaan

SEQ ID NO: 101 - DNA, 1375 bp, Homo Sapiens
  misc_feature (933)..(933): n is a, c, g, or t
  misc_feature (942)..(942): n is a, c, g, or t
  misc_feature (960)..(960): n is a, c, g, or t
  misc_feature (975)..(975): n is a, c, g, or t
  misc_feature (981)..(981): n is a, c, g, or t
  misc_feature (984)..(984): n is a, c, g, or t
  misc_feature (1017)..(1017): n is a, c, g, or t
  misc_feature (1020)..(1020): n is a, c, g, or t
  misc_feature (1023)..(1023): n is a, c, g, or t
  misc_feature (1025)..(1025): n is a, c, g, or t
  misc_feature (1032)..(1032): n is a, c, g, or t
  misc_feature (1043)..(1043): n is a, c, g, or t
  misc_feature (1066)..(1066): n is a, c, g, or t
  misc_feature (1094)..(1094): n is a, c, g, or t
  misc_feature (1107)..(1108): n is a, c, g, or t
  misc_feature (1115)..(1115): n is a, c, g, or t
  misc_feature (1119)..(1120): n is a, c, g, or t
  misc_feature (1122)..(1122): n is a, c, g, or t
  misc_feature (1143)..(1143): n is a, c, g, or t
  misc_feature (1147)..(1147): n is a, c, g, or t
  misc_feature (1157)..(1158): n is a, c, g, or t
  misc_feature (1177)..(1177): n is a, c, g, or t
  misc_feature (1183)..(1183): n is a, c, g, or t
  misc_feature (1189)..(1189): n is a, c, g, or t
  misc_feature (1192)..(1192): n is a, c, g, or t
  misc_feature (1195)..(1195): n is a, c, g, or t
  misc_feature (1200)..(1200): n is a, c, g, or t
  misc_feature (1202)..(1202): n is a, c, g, or t
  misc_feature (1213)..(1213): n is a, c, g, or t
  misc_feature (1221)..(1221): n is a, c, g, or t
  misc_feature (1223)..(1223): n is a, c, g, or t
  misc_feature (1229)..(1229): n is a, c, g, or t
  misc_feature (1233)..(1233): n is a, c, g, or t
  misc_feature (1240)..(1240): n is a, c, g, or t
  misc_feature (1248)..(1248): n is a, c, g, or t
  misc_feature (1253)..(1253): n is a, c, g, or t
  misc_feature (1255)..(1255): n is a, c, g, or t
  misc_feature (1257)..(1257): n is a, c, g, or t
  misc_feature (1272)..(1272): n is a, c, g, or t
  misc_feature (1278)..(1278): n is a, c, g, or t
  misc_feature (1291)..(1291): n is a, c, g, or t
  misc_feature (1314)..(1314): n is a, c, g, or t
  misc_feature (1317)..(1317): n is a, c, g, or t
  misc_feature (1321)..(1321): n is a, c, g, or t
  misc_feature (1327)..(1327): n is a, c, g, or t
  misc_feature (1329)..(1330): n is a, c, g, or t
  misc_feature (1341)..(1341): n is a, c, g, or t
  misc_feature (1345)..(1345): n is a, c, g, or t
  misc_feature (1358)..(1358): n is a, c, g, or t
  misc_feature (1367)..(1367): n is a, c, g, or t
tagagaaattactatgagaggatcgcatcaccatcaccatcacggatcctatttaggtgacactatagaatcgtcgacccacgcgtccgcccacgcgtccgagactgtctctgaggcaccacctttgctgttcagcgatgaagaagagaaggaggcacaacttggagtgaagtctgtggataagaaggttgagagtgccaaggagtcattaaaatttgggagaactgatgtggctgagtcagaaaaggaaggacttttgactagatctgctcaggaaacagtcaagcattctgatttattttcttcatcatccccatgggacaaaggaaccaagcctagaaccaaaactgttcttagcttgtttgatgaggaagaggataaaatggaagatcaaaacattatccaggctccacagaaagaagtaggaaagggctgcgatcctgatgcccaccccaagagcacaggtgtcttccaggatgaagagctgcttttcagccacaagctccaaaaggacaatgacccagatgttgacctttttgctggcaccaaaaaaaccaagctgttagagccaagtgttgggagcctgtttggggatgatgaagatgatgatcttttcagctctgccaagtcccagcctttggtacaagagaaaaagagagtagtgaaaaaagaccactctgttaactctttcaaaaaccagaaacatcctgaatccattcaaggtagtaaagaaaaaggcatatggaagccggaaacacctcaggactcatcaggtctcgctccatttaaaaccaaagaaccatccactcggatcgggaagatacaagcaaatttagcgatcaacccagcggccttgctgcccacagcggcttcccagatctctgaagtaaagcctgttttgccagaattggcttttccttcatctgaacacanaaggagccncggtctggaaagtgtgcntgtccttcccgggantggggnagnccggtgtgaattttgatcttccagctcaggcanacnccntnaacaagngcaaacaaaanccgtgttcaaaatgaaagggaancgtaaaccccaaacccgtgcacctaggnggctgggtgctcnnggatccncgcnngnctgagaaatgaacctcccccnaagnacccttgccnngggggctgagggccctttncccaanggcccncgnccnccccncnaaaaaccccgnggaaaaananccctgngagncccggcncccccccnccccntngnaaagggccctgtccngaaggnaaaaacccctttnaaatcctgggttttccaaagggnggngacntttttntnngggaatttttnccgngcgggtttccccngggaaaaancccgggaa

SEQ ID NO: 102 - DNA, 1089 bp, Homo Sapiens
  misc_feature (204)..(204): n is a, c, g, or t
  misc_feature (804)..(804): n is a, c, g, or t
  misc_feature (812)..(812): n is a, c, g, or t
  misc_feature (848)..(848): n is a, c, g, or t
  misc_feature (869)..(869): n is a, c, g, or t
  misc_feature (878)..(878): n is a, c, g, or t
  misc_feature (887)..(887): n is a, c, g, or t
  misc_feature (899)..(899): n is a, c, g, or t
  misc_feature (913)..(914): n is a, c, g, or t
  misc_feature (927)..(927): n is a, c, g, or t
  misc_feature (935)..(935): n is a, c, g, or t
  misc_feature (949)..(949): n is a, c, g, or t
  misc_feature (953)..(953): n is a, c, g, or t
  misc_feature (955)..(955): n is a, c, g, or t
  misc_feature (962)..(962): n is a, c, g, or t
  misc_feature (974)..(974): n is a, c, g, or t
  misc_feature (976)..(977): n is a, c, g, or t
  misc_feature (992)..(992): n is a, c, g, or t
  misc_feature (997)..(997): n is a, c, g, or t
  misc_feature (999)..(999): n is a, c, g, or t
  misc_feature (1001)..(1001): n is a, c, g, or t
  misc_feature (1011)..(1011): n is a, c, g, or t
  misc_feature (1013)..(1013): n is a, c, g, or t
  misc_feature (1016)..(1016): n is a, c, g, or t
  misc_feature (1021)..(1021): n is a, c, g, or t
  misc_feature (1024)..(1024): n is a, c, g, or t
  misc_feature (1026)..(1026): n is a, c, g, or t
  misc_feature (1033)..(1033): n is a, c, g, or t
  misc_feature (1040)..(1040): n is a, c, g, or t
  misc_feature (1042)..(1042): n is a, c, g, or t
  misc_feature (1047)..(1047): n is a, c, g, or t
  misc_feature (1057)..(1057): n is a, c, g, or t
  misc_feature (1062)..(1062): n is a, c, g, or t
  misc_feature (1069)..(1069): n is a, c, g, or t
  misc_feature (1073)..(1073): n is a, c, g, or t
  misc_feature (1076)..(1076): n is a, c, g, or t
  misc_feature (1080)..(1081): n is a, c, g, or t
  misc_feature (1086)..(1086): n is a, c, g, or t
agagaaattactatgagaggatcgcatcaccatcaccatcacggatcctatttaggtgacactatagaatcgtcgacccacgcgtccgcccacgcgtccgcccacgcgtccgcccacgcgtccgcggcagcggcggcggcggctgcagaacagcaaagttccaatggtcctgtaaagaagtccatgcgtgagaaggctgttganagaaggagtgtcaataaagagcacaacagtaactttaaagctggatacattccgattgatgaagatcgtctccacaaaacagggttgagaggaagaaagggcaatttagccatctgtgtgattatcctcttgtttatcctggctgtcatcaatttaataataacacttgttatttgggccgtgattcgcattggaccaaatggctgtgatagtatggagtttcatgaaagtggcctgcttcgatttaagcaagtatctgacatgggagtgatccaccctctttataaaagcacagtaggaggaaggcgaaatgaaaatttggtcatcactggcaacaaccagcctattgtttttcagcaagggacaacaaagctcagtgtagaaaacaacaaaacttctattacaagtgacatcggcatgcagttttttgacccgaggactcaaaatatcttattcagcacagactatgaaactcatgagtttcatttgccaagtggagtgaaaagtttgaatgttcaaaaggcatctactgaaagggattaccagcaatgctaccagtgatttaaatataaaagttgatgggcgtgctattgtgcgtgnaaatgaangtgtattcattatgggcaaaaaccatttgaatttcncatggggtgggtaatatgggngttaaaggncggaaaaanagtatcatcccnaaatgggatcctgnngaagggtcaaccnccaccccncctacccagtttcntccnantggaaanccatttggggtnanngggggacctgggtanccctncnanctctgcatgngnggntgatnggnanccccttnccaaggngnaaggnaacccacccnaaaanatgggcngccnaanttcnnaaaanacc

SEQ ID NO: 103 - DNA, 904 bp, Homo Sapiens
atgagaggatcgcatcaccatcaccatcacggatcctatttaggtgacactatagaatcgtcgacctgcaagatctgcggccgctccctatagtgagtcgtattaagcttaattagctgagcttggactcctgttgatagatccagtaatgacctcagaactccatctggatttgttcagaacgctcggttgccgccgggcgttttttattggtgagaatccaagctagcttggcgagattttcaggagctaaggaagctaaaatggagaaaaaaatcactggatataccaccgttgatatatcccaatggcatcgtaaagaacattttgaggcatttcagtcagttgctcaatgtacctataaccagaccgttcagctggatattacggcctttttaaagaccgtaaagaaaaataagcacaagttttatccggcctttattcacattcttgcccgcctgatgaatgctcatccggaatttcgtatggcaatgaaagacggtgagctggtgatatgggatagtgttcacccttgttacaccgttttccatgagcaaactgaaacgttttcatcgctctggagtgaataccacgacgatttccggcagtttctacacatatattcgcaagatgtggcgtgttacggtgaaaacctggcctatttccctaaagggtttattgagaatatgtttttcgtctcagccaatccctgggtgagtttcaccagttttgatttaaacgtggccaatatggacaacttcttcgcccccgttttcaccatgggcaaatattatacgcaaggcgacaaggtgctgatgccgctggcgattcacgttcatcatgccgtttgtgatggcttccatgtcggcagaatgcttaatgaattacaacagtactgcgatga

SEQ ID NO: 104 - DNA, 916 bp, Homo Sapiens
atgagaggatcgcatcaccatcaccatcacggatcctatttaggtgacactatagaatcgtcgacccacgcgtccgggcgccgtctgagccgcagacctgcagccgcgccgggagccccgagcagtcgggcgcgcactcgcagcgcgggcggccccccagcatgcggcacgccttgcccgggccgcactccacgccgtcgcacgaatctgcggacagaggacacgcgcgtggggccgggcgcgggagggtcccgggcgtggggccgcgcgaaggcctcggggcccctccctgcgccccttctgcagggcggaggcgggggcgccgtcccaggtcagggtcagtcggagtcggggccctcgggttcccaggggcagggctcagggtccgggcgcgggaccggtggggccgaggtccgcgctgcgcctgcgctggggggcgggggctgggctcggtgcgcgcgggccggggcgggggggggtctctgcccggaatcggggtccagcggagctacgcagccccgggccgctcctccttgcagctggctgacgtctgctcccgatgcacgcgctcttctgggaaggccggaggggccccagctgcgtcagcctggggtgttccgcccttgccaggcgcgagtctggggctgccaggaccttcccccaggaggcgtcggggagggcggggcgctggacggccctcctggcctggggagcgattccaggggagggggccccccacagccctaggcctctgaaccaggagctgccccgcagccccgctgctcagacagggatattgaggtcctgctagggaagctctctctggggtccccgcccccgctttcaatgtgaatgctcatcgcctcctaggcttatcgcatcttcccaagtcatcattttacagatggggaaactg

SEQ ID NO: 105 - DNA, 1195 bp, Homo Sapiens
  misc_feature (905)..(905): n is a, c, g, or t
  misc_feature (907)..(907): n is a, c, g, or t
  misc_feature (909)..(909): n is a, c, g, or t
  misc_feature (921)..(921): n is a, c, g, or t
  misc_feature (931)..(931): n is a, c, g, or t
  misc_feature (934)..(934): n is a, c, g, or t
  misc_feature (942)..(942): n is a, c, g, or t
  misc_feature (952)..(952): n is a, c, g, or t
  misc_feature (954)..(954): n is a, c, g, or t
  misc_feature (963)..(963): n is a, c, g, or t
  misc_feature (972)..(972): n is a, c, g, or t
  misc_feature (981)..(981): n is a, c, g, or t
  misc_feature (999)..(999): n is a, c, g, or t
  misc_feature (1003)..(1003): n is a, c, g, or t
  misc_feature (1005)..(1005): n is a, c, g, or t
  misc_feature (1012)..(1012): n is a, c, g, or t
  misc_feature (1033)..(1033): n is a, c, g, or t
  misc_feature (1037)..(1037): n is a, c, g, or t
  misc_feature (1063)..(1063): n is a, c, g, or t
  misc_feature (1080)..(1080): n is a, c, g, or t
  misc_feature (1097)..(1097): n is a, c, g, or t
  misc_feature (1101)..(1101): n is a, c, g, or t
  misc_feature (1110)..(1111): n is a, c, g, or t
  misc_feature (1114)..(1115): n is a, c, g, or t
  misc_feature (1123)..(1123): n is a, c, g, or t
  misc_feature (1128)..(1128): n is a, c, g, or t
  misc_feature (1142)..(1142): n is a, c, g, or t
  misc_feature (1159)..(1159): n is a, c, g, or t
  misc_feature (1177)..(1177): n is a, c, g, or t
  misc_feature (1187)..(1188): n is a, c, g, or t
  misc_feature (1190)..(1191): n is a, c, g, or t
  misc_feature (1193)..(1193): n is a, c, g, or t
tagagaaattactatgagaggatcgcatcaccatcaccatcacggatcctatttaggtgacactatagaatcgtcgacccacgcgtccgcggggccggagcagcgggcggcggcggaggcggcgcccgggagcgctcttcgcttccctcggggtcttgctcggacctcggccaccgcctgggatccccaggactcgtgcgtgcagcatgggcggcgtcggggagccgggaccgcgggagggacccgcgcagccgggggcaccgctgcccaccttctgctgggagcagatccgcgcgcacgaccagcccggcgacaagtggctggtcatcgagcgccgcgtctacgacatcagccgctgggcacagcggcacccagggggcagccgcctcatcggccaccacggcgctgaggacgccacggatgccttccgtgccttccatcaagatctcaattttgtgcgcaagttcctacagcccctgttgattggagagctggctccggaagaacccagccaggatggacccctgaatgcgcagctggtcgaggacttccgagccctgcaccaggcagccgaggacatgaagctgtttgatgccagtcccaccttctttgctttcctactgggccacatcctggccatggaggtgctggcctggctccttatctacctcctgggtcctggctgggtgcccagtgccctggccgccttcatcctggccatctctcaggctcagtcctggtgtctgcagcatgacctgggccatgcctccatcttcaagaagtcctggtggaaccacgtggcccagaagttcgtgatggggcagctaaagggcttctccgcccactggtggaacttccgccacttccagcaccacgccaagcccaacatctttcacaaagaaccnanangtgacggtggcncccgtcttcntcntgggggantcatccgtcnantatggcaanaaaaaaacncaaaaaacntacccttaaaacaagcancacntntaatttnttcttgatgggccgccgctgntccncctggtgaaattttaaatgaaaaatntggcgaaatgctggtgngcaagcaagggggggantttntttgggccnncannttttatgnccccnttttttttatctanctcccttttaaagggtncctgggggggtgctcttnttttttcctnnannangg

SEQ ID NO: 106 - DNA, 854 bp, Homo Sapiens
atgagaggatcgcatcaccatcaccatcacggatcctatttaggtgacactatagaatcgtcgacccacgcgtccgcagagacgcagcctgctgggagcggcccaagctctgcaccggcccgcggcgggagcacagcagccccctcccgcccctcctcccgggggctccgaggggtggttatggggcgagggtccttgcggggcccgggcagtgaagggcctggaggccccagagtctgtgccaggtctgagccgcggggcgtggggggaggaggggcctcggccggggcccaggagacccaggacaggtgggcctggggccaggtccctacggagaggtggccgggccgggctctggcttgccggggtaggggctccgctaggggctggagtccgtcccttcgccagcgcagagcccctcggcccgcatctgccaagtgactgaggatcgagcgacagcgtagtggggcggaggggctggaggcacggccggaaagggtgagcggcgccgtggctcccccgctatttatttggccccgccacgcgcggagagggaggaaattctcaggctgcggctgcagctaggggaggcccaggtgggcctggaatgggcccagagagggcttcctgggtcagacgtgtagatccagtggacgtgaaaaccgggtttcgagctcgccgggccgtgtcgcgccatgcccgctggctgagcgccgcagggcctcgtcccgccaggcgtgggggccgcgcgcgcccaggccggggcccggcggccgaccatggtgctgccgcccccggaccggcgccacgtgtgcctgaccacgctggtgatcatgggcagcatggccgtcatg

SEQ ID NO: 107 - DNA, 715 bp, Homo Sapiens
  misc_feature (689)..(691): n is a, c, g, or t
  misc_feature (693)..(693): n is a, c, g, or t
  misc_feature (696)..(699): n is a, c, g, or t
  misc_feature (702)..(715): n is a, c, g, or t
agagaaattactatgagaggatcgcatcaccatcaccatcacggatcctatttaggtgacactatagaatcgtcgacccacgcgtccggtggttcccaaagatgtcaatgctgccattgccaccatcaagaccaagcgtaccatccagtttgtggattggtgccccactggcttcaaggttggcatcaactaccagcctcccactgtggtgcctggtggagacctggccaaggtacagagagctgtgtgcatgctgagcaacaccacagccattgctgaggcctgggctcgcctggaccacaagtttgacctgatgtatgccaaacgtgcctttgttcactggtacgttggggaggggatggaggaaggtgagttttcagaggcccgtgaggacatggctgcccttgagaaggattatgaggaggttggtgtggattctgttgaaggagagggtgaggaagaaggagaggaatactaaagttaaaacgtcacaaaggtgctgcttttacagggaagcttattctgttttaaacattgaaaagttgtggtctgatcagttaatttgtatgtagcagtgtatgctctcatatacaattactgacctatgctctaaaacatgaatgctttgttacagacccaagctgtccatttctgtgatgggttttgaataaagtattccctgtcttaannnanaannnnaannnnnnnnnnnnnn

SEQ ID NO: 108 - DNA, 925 bp, Homo Sapiens
atgagaggatcgcatcaccatcaccatcacggatcctatttaggtgacactatagaatcgtcgacccacgcgtccggcggagaagcgcgcaaggcaccggtggcagcggcgacggcagctgcgacagcaacccctgctgggccgaaactgggcagagcggagcagacgtctgaagcagcgcgagtgaggcgcgagggtagcgcccgcgcccgggaagacccctcggcgcgaaccggcagcccagccccgggtcccggttcccaaggccccgcctctagggcctggggactaatcggattgagagcgcgccggcccgggccgcgaactcgccaattgcggagggcggtggccaccgcccaatccggagcagacaggtgcgaggtccggaaggcggaggccaatcggcggcggttgcgacctgctggggcaggtctcggccaataaggaggctcgagtgacatcttcgcgcaccaatcgggagtgagggagcattcgtgcccgctcgcccttccggccagacctctatttaccaggggcgtgcagcccgcttgccaatcagagcgcggctgagcggccccgcagccaacccccgaggagcggccggctggcgtccgccgcgcccaggagttggggatgtcctacaaacccatcgcccctgctcccagcagcacccctggctccagcacccctgggccgggcaccccggtccctacaggaagcgtcccgtcgccgtcgggctcagtgccaggagccggcgctcctttcagaccgctgtttaacgactttggaccgccttccatgggctacgtgcaggcgatgaagccacccggcgcccagggctcccagagcacctacacggacctgctgtcagtcatagaggagatgggcaaagagatccggcctacctatgctggcagcaagagcg

SEQ ID NO: 109 - DNA, 947 bp, Homo Sapiens
  misc_feature (916)..(916): n is a, c, g, or t
  misc_feature (924)..(924): n is a, c, g, or t
  misc_feature (926)..(947): n is a, c, g, or t
agagaaattactatgagaggatcgcatcaccatcaccatcacggatcctatttaggtgacactatagaatcgtcgacccacgcgtccgcccacgcgtccggtcagaaccgccgtcgctcgctcccttctcggcagtggtacctgttcccggtgtccctgaggacgtgcgggccaggtacggccccgaaagtaggaagcggagggggagcaggtttgcggggccaagtgttgcggcgacgcacctcacgtcgagaatcgggaggaggagactgcaaggataggcccaggagtaatggagtccaaagaggaacgagcgttaaacaatctcatcgtggaaaatgtcaaccaggaaaatgatgaaaaagatgaaaaggagcaagttgctaataaaggggagcccttggccctacctttgaatgttagtgaatactgtgtgcctagaggaaaccgtaggcggttccgcgttaggcagcccatcctgcagtatagatgggacataatgcataggcttggagagccacaggcaaggatgagagaggagaatatggaaaggattggggaggaggtgagacagctgatggaaaagctgagggaaaagcagttgagtcatagtctgcgggcagtcagcactgatccccctcaccatgaccatcacgatgagttttgccttatgccctgaatcctgatggtttccctgaagttaatagggagacccctgcttcctaaacttacacatttgtggtgtacctttgtcgtaaacgttttgatgttacctatttcttgtgggtctcctattaccagcttctaaatgaatgttgtttttgacccagtttgtaagtttctgtcagcaggagagttttacctattgcatggaaagatgctcattatatattgtgaagttaataaaacagttttnaaaagccnannnnnnnnnnnnnnnnnnnnnn

SEQ ID NO: 110 - DNA, 831 bp, Homo Sapiens
  misc_feature (697)..(697): n is a, c, g, or t
  misc_feature (758)..(758): n is a, c, g, or t
  misc_feature (763)..(763): n is a, c, g, or t
  misc_feature (783)..(783): n is a, c, g, or t
  misc_feature (786)..(786): n is a, c, g, or t
  misc_feature (788)..(789): n is a, c, g, or t
  misc_feature (798)..(798): n is a, c, g, or t
  misc_feature (806)..(806): n is a, c, g, or t
  misc_feature (810)..(811): n is a, c, g, or t
  misc_feature (816)..(817): n is a, c, g, or t
  misc_feature (819)..(820): n is a, c, g, or t
  misc_feature (823)..(823): n is a, c, g, or t
  misc_feature (827)..(828): n is a, c, g, or t
tagagagattactatgagaggatcgcatcaccctcaccatcacggatcctatttaggtgacactatagaatcgtcgacccacgcgtccgcccacgcgatccgggcgaagtgcgcgcgcgattgctccgggctctgcgcctggtgcggcggctgcgcggcctgagccaggccctgcgcgaggccgaagccgacggcgcggcctgggtcctgctgtactcccagaccgcgccgctgcgcgcggaactggccgagcggctacagccgttgacccaggctgcctatgtgggcgaggcgcggaggaggctggagagggtccggcgccgccggctgcggcttcgcgagagggcccgggaacgcgaggccgagcgggaggcagaggccgcgcgggcagtggaacgcgagcaggagattgaccgctggagggtgaagtgtgtgcaggaggtggaggagaagaagcgggagcaggaactcaaagcagccgctgatggcgtactatctgaagtgaggaaaaaacaagcagataccaaaagaatggtggacattctacgggctttggagaaattgaggaaactgaggaaagaggctgcagcgaggaaaggggtctgtcctccagcctcagcagatgagacttttacgcatcatcttcagcgactgagaaaactcattaaaaagcgctctgaactgtatgaagctgaanagagagccctcatagttatgctagaaggagaacaagaggaaagagaggaaaagagaattanaaaanaaaccttaataaaaaaattntanannaaattttantatatttntttnnaatanntnnccnaatnnttt

SEQ ID NO: 111 - DNA, 557 bp, Homo Sapiens
atgagaggtcgcatcaccatcaccatcacggatcctatttaggtgacactatagaatcgtcgacccacgcgtccgccgagctggttggtggcggcggtcgtgcggacgcaaacatgcagatctttgtgaagaccctcactggcaaaaccatcacccttgaggtcgagcccagtgacaccattgagaatgtcaaagccaaaattcaagacaaggagggtatcccacctgaccagcagcgtctgatatttgccggcaaacagctggaggatggccgcactctctcagactacaacatccagaaagagtccaccctgcacctggtgttgcgcctgcgaggtggcattattgagccttctctccgccagcttgcccagaaatacaactgcgacaagatgatctgccgcaagtgctatgctcgccttcaccctcgtgctgtcaactgccgcaagaagaagtgtggtcacaccaacaacctgcgtcccaagaagaaggtcaaataaggtggttctttccttgaagggcagcctcctgcccaggccccgtggccctggagcctc

SEQ ID NO: 112 - DNA, 1153 bp, Homo Sapiens
  misc_feature (854)..(854): n is a, c, g, or t
  misc_feature (856)..(856): n is a, c, g, or t
  misc_feature (894)..(894): n is a, c, g, or t
  misc_feature (912)..(912): n is a, c, g, or t
  misc_feature (924)..(924): n is a, c, g, or t
  misc_feature (928)..(928): n is a, c, g, or t
  misc_feature (951)..(951): n is a, c, g, or t
  misc_feature (956)..(956): n is a, c, g, or t
  misc_feature (959)..(959): n is a, c, g, or t
  misc_feature (963)..(963): n is a, c, g, or t
  misc_feature (965)..(965): n is a, c, g, or t
  misc_feature (975)..(975): n is a, c, g, or t
  misc_feature (981)..(981): n is a, c, g, or t
  misc_feature (987)..(987): n is a, c, g, or t
  misc_feature (993)..(993): n is a, c, g, or t
  misc_feature (995)..(995): n is a, c, g, or t
  misc_feature (999)..(999): n is a, c, g, or t
  misc_feature (1003)..(1003): n is a, c, g, or t
  misc_feature (1018)..(1018): n is a, c, g, or t
  misc_feature (1028)..(1028): n is a, c, g, or t
  misc_feature (1035)..(1035): n is a, c, g, or t
  misc_feature (1038)..(1038): n is a, c, g, or t
  misc_feature (1067)..(1069): n is a, c, g, or t
  misc_feature (1072)..(1072): n is a, c, g, or t
  misc_feature (1077)..(1077): n is a, c, g, or t
  misc_feature (1114)..(1116): n is a, c, g, or t
  misc_feature (1119)..(1119): n is a, c, g, or t
  misc_feature (1129)..(1129): n is a, c, g, or t
  misc_feature (1135)..(1135): n is a, c, g, or t
  misc_feature (1140)..(1140): n is a, c, g, or t
  misc_feature (1150)..(1150): n is a, c, g, or t
gagaaattactatgagaggatcgcatcaccatcaccatcacggatcctatttaggtgacactatagaatcgtcgacccacgcgtccgcgcaccttctgccagctgatcctggaccccatctccacctacggcgagggcgagagcggccccatgggcaacatcatgatcgatcctgtcctcggtaccgtgggctttgggtctggcctccacgggtgggccttcaccctgaagcagtttgccgagatgtatgtggccaagttcgccgccaagggggagggccagttggggcctgccgagcgggccaagaaagtagaggacaaggacaaagaaggcaaacccctgctgaaggctgtgatgcgccgctggctgcctgccggagacgccttgttgcagatgatcaccatccacctgccctcccctgtgacggcccagaagtaccgctgcgagctcctgtacgaggggcccccggacgacgaggctgccatgggcattaaaagctgtgaccccaaaggccctcttatgatgtatatttccaaaatggtgccaacctccgacaaaggtcggttctacgcctttggacgagtcttctcggggctggtctccactggcctgaaggtcaggatcatggggcccaactatacccctgggaagaaggaggacctctacctgaagccaatccagagaacaatcttgatgatgggccgctacgtggagcccatcgaggatgtgccttgtgggaacattgtgggcctcgtgggcgtggaccagttcctggtgaagacgggcaccatcaccaccttcgagcacgcgcacaacatgcgggtgatgaagttcagcgtcagccctgttgtcanantggccgtggaggccaaaaacccggctgacctgcccaanctggtggaggggctgaancggctggccaantccnacccatggtgcagtgcatcatcnaggantcngganancacatcatcncgggcnccggcnaactgnanctgnaatntgcctgaaggactgnagaagacacncctgctnccnatcaaaaattgaaccggtcgtttcgtacnnnaangtcangaaaaatcaaagtgtttgctttcaagtccccaaaaannnaancggtgtaaanaagggnggccnttcccaaggntgg

SEQ ID NO: 113 - DNA, 934 bp, Homo Sapiens
atgagaggatcgcatcaccatcaccatcacggatcctatttaggtgacactatagaatcgtcgacccacgcgtccgcaggagaggctcagcctagactatacagtgactccggggagcaccagaaaagaccctgcccaggccccacccagaccacaacatccacctctctggtggggccagtgtgtggtgggggcctcccgttagaggtagatgtgtgcatgcctggtgcagggggctggtgcagagcattggcaggagtggcacaggaggccggcggcacctggagctccgcagcatccacccaggcctctcagccacaccgagttccccttcccgcatgcccctaggtctgcacccgctgccccgggccggctacctgcgctccccttcctggacgaggacaagggctgagcagagccacgagaagcagcccctaggcgaccccgagcggcaggccacagtcctggacacgtttctcactgtggagaggccccaggaggactagaccatctccacctgccccagctcctgcagggatggggtccgaacacgatggcagatctgggcagtgctgacccagcagacacacttcacccgcccacgaggctccagccgtcacctcctgacacacaccctgggggcagctctctgccagccccgagaccggccttgtctgctgggcacgggtcttcgcctcacttggagaccagccggctttcctgggggacacacggggcccccggatgcctctgggagccccagcacaagcacagcccagtggccttacgtccagctcgttcctgggccccgagtcaggaagacagcgtcacggagtcactgccaggaacgtgctgaggaatggagtggcccacggcggccttgggggtgaaggggacccaggcctgtgacagccactccaggaactcctggggg

SEQ ID NO: 114 - DNA, 1315 bp, Homo Sapiens
  misc_feature (827)..(827): n is a, c, g, or t
  misc_feature (883)..(883): n is a, c, g, or t
  misc_feature (900)..(900): n is a, c, g, or t
  misc_feature (926)..(926): n is a, c, g, or t
  misc_feature (954)..(954): n is a, c, g, or t
  misc_feature (970)..(970): n is a, c, g, or t
  misc_feature (977)..(977): n is a, c, g, or t
  misc_feature (1000)..(1000): n is a, c, g, or t
  misc_feature (1014)..(1014): n is a, c, g, or t
  misc_feature (1020)..(1020): n is a, c, g, or t
  misc_feature (1038)..(1038): n is a, c, g, or t
  misc_feature (1059)..(1059): n is a, c, g, or t
  misc_feature (1073)..(1074): n is a, c, g, or t
  misc_feature (1077)..(1077): n is a, c, g, or t
  misc_feature (1088)..(1088): n is a, c, g, or t
  misc_feature (1090)..(1090): n is a, c, g, or t
  misc_feature (1094)..(1094): n is a, c, g, or t
  misc_feature (1107)..(1107): n is a, c, g, or t
  misc_feature (1110)..(1110): n is a, c, g, or t
  misc_feature (1121)..(1121): n is a, c, g, or t
  misc_feature (1127)..(1127): n is a, c, g, or t
  misc_feature (1133)..(1133): n is a, c, g, or t
  misc_feature (1137)..(1137): n is a, c, g, or t
  misc_feature (1147)..(1147): n is a, c, g, or t
  misc_feature (1154)..(1154): n is a, c, g, or t
  misc_feature (1157)..(1157): n is a, c, g, or t
  misc_feature (1159)..(1159): n is a, c, g, or t
  misc_feature (1180)..(1181): n is a, c, g, or t
  misc_feature (1183)..(1183): n is a, c, g, or t
  misc_feature (1205)..(1205): n is a, c, g, or t
  misc_feature (1211)..(1211): n is a, c, g, or t
  misc_feature (1215)..(1215): n is a, c, g, or t
  misc_feature (1227)..(1227): n is a, c, g, or t
  misc_feature (1234)..(1234): n is a, c, g, or t
  misc_feature (1240)..(1240): n is a, c, g, or t
  misc_feature (1276)..(1276): n is a, c, g, or t
  misc_feature (1279)..(1279): n is a, c, g, or t
  misc_feature (1286)..(1286): n is a, c, g, or t
  misc_feature (1295)..(1295): n is a, c, g, or t
  misc_feature (1297)..(1298): n is a, c, g, or t
  misc_feature (1300)..(1300): n is a, c, g, or t
  misc_feature (1303)..(1315): n is a, c, g, or t
agagaaattactatgagaggatcgcatcaccatcaccatcacggatcctatttaggtgacactatagaatcgtcgacccacgcgtccgcaccagtgcgcccgccggagggtgtttatcgcggctagagagatgtcgctgctgcggtcgctgcgcgtgtttctggtcgcgcggaccgggagctacccggctgggtctcttctgcgtcagtcgccccagccaaggcacacattttatgctgggccccgtctgtctgcctcggcctccagcaaggagctcctcatgaagctgcggcggaaaacaggctactcctttgtaaattgcaagaaagctctggagacttgtggcggggacctcaaacaggcagagatctggctccacaaggaggcccagaaggagggctggagcaaagctgccaagctccaagggaggaagaccaaagaaggcctgattgggctgttgcaggaaggaaacacaactgtattagtagaggtaaactgtgagacagattttgtttctagaaatttaaaatttcaactgttggtccagcaagtagcccttggaaccatgatgcattgtcagaccctaaaggatcaaccctctgcatacagtaaaggtttcttgaattcctctgagctttctggacttccagctgggcctgacagagaaggctcactcaaggatcagttggctttagcaattggaaaactgggagaaaacatgattcttaaacgagctgcatgggtgaaggtgccatctgggttctacgttggctcttatgtccacggagcaatgcagagtccctcacttcacaagctggtgctggggnaagtatgggggccctggtcatctgtgagacgtctgaacagaaaacaaaccttgaanacgttggccgccccccnttgggcaaccatgtggtgggcatggncccccctctctgttggctccctggaacnaatgaaccctgggggnaaaggcnaaaaaataaaaatgctgtcccanccgtattttgctgnatcccnccattaccttgggggcantatgtgcaaccctcagggggngtcggtaagaaaannttnggcggtttgantntggnaaaaggtgaaaangcnccaaaaacttnaaaagnttcccnaaanttttggcccnaagaagnaananttacttttaacccccgggacnncnttacaaaaagggaattttcccnaacccncttncaaccgaaaagncgggggnaaaatnttaaaaaaattgtaaaaaaaaaaaaattttttcttnttnggccccnaaaaaaaanannanaannnnnnnnnnnnn

SEQ ID NO: 115 - DNA, 892 bp, Homo Sapiens
  misc_feature (538)..(539): n is a, c, g, or t
ctgagagattacttgagaggtcgcatcccatcaccatcacggatcctatttaggtgacactatagaatcgtcgactctggaccttggctgtcactcagttttacaggagcgggcccaggcctggggcgagcggctgcgcgcgcggatggaggagatgggcagccggacccgcgaccgcctggacgaggtgaaggagcaggtggcggaggtgcgcgccaagctggaggagcaggcccagcagatacgcctgcaggccgaggccttccaggcccgcctcaagagctggttcgagcccctggtggaagacatgcagcgccagtgggccgggctggtggagaaggtgcaggctgccgtgggcaccagcgccgcccctgtgcccagcgacaatcactgaacgccgaagcctgcagccatgcgaccccacgccaccccgtgcctcctgcctctgcgcagcctgtagcgggagaccctgtccccgccccagccgtcctcctggggtggaccctagtttaataaagattcaccaagtttcgcgctnnagaaatgctcaataagacatttatagatccgagcggccgctccctatagtgagtcgtattaagcttaattagctgatcttggactcctgttgatagatccagtaatgacctcagaactccttctggatttgttcaaaactctcggttgccgccgggcgttttttattgatgagaatccaagctagcttggcgagatttcaggagctacggaagctaaaatggagaaaaaatcgctggatatcccaccgttgatatatcccatggcatcggtaagacattttgaggctttccgtcggtgctcaagtactataacaaaacgttcactggaaatacggccttttaaaacccaaaaa

SEQ ID NO: 116 - DNA, 1320 bp, Homo Sapiens
tatacgacttacctataaaataggcgtatccgaggccctttcgtcttcacctcgagaaatcataaaaaatttatttgctttgtgagcggataacaattataatagattcaattgtgagcggataacaatttcacacagaattcattaaagaggagaaattaactatgagaggatcgcatcaccatcaccatcacggtcgacccacgcgtccgcggacgcgtggggccgtgtgtggcagcgccatgtcccaaagtttactcaagactacccaggaacctcttgcccgagatcctgttaaacttcctacaacagcagccagtacccctgatgccgttgacaagtatctcgagacacctggggatgagaatgaacatgcccatttccagaaagccaaagagaggcttgaggccaagcaccgagagagaatgtcccaggtcgtgagagaatgggaagaggcagaacgtcaagcaaagaacggccgggtagagtttgtgtgttgcccactggctgaagaaagtgacaatgtggattctgctgatgcggaggaggatgactcggatgtctggtggggcggagcagacacagactatgcagatgggagtgaagacaaagtagtagaagtagcagaggaggaagaagtggctgaggtggaagaagaagaagccgatgatgacgaggacgatgaggatggtgatgaggtagaggaagaggctgaggaaccctacgaagaagccacagagagaaccaccagcattgccaccaccaccaccaccaccacagagtctgtggaagaggtggttcgagaggtgtgctctgaacaagccgagacggggccgggccgaacaatgatctcccgctggtactttgatgtgactgaaaggaagtgtgcccattctttttacgcggatgtggcgggaaccggaacaacttggacacgaaaagtacctgctggccgggggtggcacccccatgtcccaaagttactcaaaactacccacgaacctcctgcccaaaatcctggtaaacttccaacaaaaaaaccagaacccctgatcccgttgaaaaaatccccaaacccctggggaagaaaatgaaacggccctttcccaaaaaccaaataaaggtctggggccaacccccaaaaaaatgttccagccttgaaaaaaggggaaaaggaacactcaataagaaaggcccaaaccctgggcacccaataattgcactcgaccctgtgaaaaacacacaacccctaaaccccccgttctttcaaaacctcattaccccctttattttattgaacaccctcctcgtggaaattca

SEQ ID NO: 117 - DNA, 890 bp, Homo Sapiens
  misc_feature (731)..(731): n is a, c, g, or t
tactatgagaggacgcatcaccatcaccatcacggatcctatttaggtgacactatagaatcgtcgactctggaccttggctgtcactcagttaagtgcaaagaggaagtgaagagaaaggaagtacagaaaacatgcagaaagcacagaaaggaaaaccaaggttctcatgaatctccaaccttaaatcctgaaacagtggcaataaatttatctgatgttgacttgagtaaatatatcaccactattgctggagtcatgacactaagtcaagttaaaggctttgttcgaaagaatggtgtcaatgaagccaaaatagatgagatcaagaatgacaatgtccaagacacagcagaacagaaagttcaactgcttcgtaattggcatcaacttcatggaaagaaagaagcgtatgacacattgattaaagatctcaaaaaagccaatctttgtactcttgcagagaaaattcagactatcatcctcaaggacattactagtgactcagaaaattcaaacttcagaaatgaaatccaaagcttggtctagagtgaaaaacaacaaattcagttctgagtatatgcaattagtgtttgaaaagattcttaatagctggctgtaaatactgcttggttttttactgggtacattttatcatttattagcgctgaagagccaacatatttgtagatttttaatatctcatgattctgcctccaaggatgtttaanatctagttgggaaaacaaacttcatcaagagtaatgcagtggcatgctaagtacccaataggagtgtatgcagaagatgaaagattagatatgctctggcatctacatatgatctgtagtatgatgtatcagtgatgtagtacaatgtctatcacagct

SEQ ID NO: 118 - DNA, 1371 bp, Homo Sapiens
  misc_feature (1049)..(1049): n is a, c, g, or t
  misc_feature (1169)..(1175): n is a, c, g, or t
  misc_feature (1327)..(1327): n is a, c, g, or t
  misc_feature (1339)..(1339): n is a, c, g, or t
  misc_feature (1349)..(1351): n is a, c, g, or t
  misc_feature (1356)..(1357): n is a, c, g, or t
ggaccctagagaatactagagaggatgcatcaccatcaccatcacggtcgacccacgcgtccggtctgtgcccaaatcaacaagagcctgctgaagataatcaacgactatgaagaattcagcaaagagagaagcagcagccttgaaggaagtcctgatgaattttcaaatggggaggagttgtgtggggtaatgacaatctcggactctccaagagaacaggatagtgaatcacagactttggacaaagtttaccaaatgaaaagcaaacctcggggatactgtctgatcatcaacaatcacaattttgcaaaagcacgggagaaagtgcccaaacttcacagcattagggacaggaatggaacacacttggatgcaggtacagtagaacccaaaagagaaaagtaaaatatttcttatgcctatttttttttaaatcaaaagggagagaacaaaagctataccaaaagggccatgtttcaagaaaatggatttaaacatatttccctgtggaggggctttgaccacgacctttgaagagcttcattttgagatcaagccccaccatgactgcacagtagagcaaatctatgagattttgaaaatctaccaactcatggaccacagtaacatggactgcttcatctgctgtatcctctcccatggagacaagggcatcatctatggcactgatggacaggaggcccccatctatgagctgacatctcagttcactggtttgaagtgcccttcccttgctggaaaacccaaagtgttttttattcaggcttgtcagggggataactaccagaaaggtatacctgttgagactgattcagaggagcaaccctatttagaaatggatttatcatcacctcaaacgagatatatcccggatgaggctgactttcgcctggggatggccactgtgaataactgtgtttcctaccgaaaccctgcagagggaacctggtacatccagtcactttgccagaactgaaaaaacgatgtcctcaaagcgatgatatcttcccatcctgactgagtgnactatgaagtagcaaccaggatgacaagaaaacctggggaaacagatgcctcacctacttccaactaaaaaaaaacttgcttcctcctgatggaggggcgattttgtgggtttgttttgnnnnnnntttttttaaaaaaaatcttccctgccccacggggggggggaggggggattctgtctccccaaacccccctccgggttacccatttttcgctccccctccaaaatgggaaaagggccccccccccctgttatttttaatattttaaaaaaagnttctttgtaccnggggttttcnnnccccnnaaccccccccccca

SEQ ID NO: 119 - DNA, 1195 bp, Homo Sapiens
  misc_feature (960)..(960): n is a, c, g, or t
  misc_feature (965)..(965): n is a, c, g, or t
  misc_feature (976)..(976): n is a, c, g, or t
  misc_feature (1012)..(1012): n is a, c, g, or t
  misc_feature (1023)..(1023): n is a, c, g, or t
  misc_feature (1035)..(1035): n is a, c, g, or t
  misc_feature (1039)..(1039): n is a, c, g, or t
  misc_feature (1073)..(1073): n is a, c, g, or t
  misc_feature (1077)..(1077): n is a, c, g, or t
  misc_feature (1083)..(1083): n is a, c, g, or t
  misc_feature (1085)..(1085): n is a, c, g, or t
  misc_feature (1087)..(1087): n is a, c, g, or t
  misc_feature (1096)..(1096): n is a, c, g, or t
  misc_feature (1104)..(1104): n is a, c, g, or t
  misc_feature (1119)..(1119): n is a, c, g, or t
  misc_feature (1128)..(1128): n is a, c, g, or t
  misc_feature (1130)..(1130): n is a, c, g, or t
  misc_feature (1136)..(1136): n is a, c, g, or t
  misc_feature (1149)..(1149): n is a, c, g, or t
  misc_feature (1152)..(1152): n is a, c, g, or t
  misc_feature (1170)..(1170): n is a, c, g, or t
  misc_feature (1175)..(1176): n is a, c, g, or t
  misc_feature (1178)..(1178): n is a, c, g, or t
  misc_feature (1183)..(1183): n is a, c, g, or t
  misc_feature (1189)..(1190): n is a, c, g, or t
  misc_feature (1192)..(1192): n is a, c, g, or t
tagagaaattactatgagaggatcgcatcaccatcaccatcacggatcctatttaggtgacactatagaatcgtcgacccacgcgtccggggcagagcaatggtggccaggctcgggctggggctgctgctgctggcactgctcctacccacgcagatttattccagtgaaacaacaactggaacttcaagtaactcctcccagagtacttccaactctgggttggccccaaatccaactaatgccaccaccaaggcggctggtggtgccctgcagtcaacagccagtctcttcgtggtctcactctctcttctgcatctctactcttaagagactcaggccaagaaacgtcttctaaatttccccatcttctaaacccaatccaaatggcgtctggaagtccaatgtggcaaggaaaaacaggtcttcatcgaatctactaattccacaccttttattgacacagaaaatgttgagaatcccaaatttgattgatttgaagaacatgtgagaggtttgactagatgatggatgccaatattaaatctgctggagtttcatgtacaagatgaaggagaggcaacatccaaaatagttaagacatgatttccttgaatgtggcttgagaaatatggacacttaatactaccttgaaaataagaatagaaataaaggatgggattgtggaatggagattcagttttcatttggttcattaattctataaggccataaaacaggtaatataaaaagcttccatgattctatttatatgtacatgagaaggaacttccaggtgttactgtaattcctcaacgtattgtttcgacagcactaatttaatgccgatatactctagatgaagttttacattgttgagctattgctgttctcttgggaactgaactcactttcctcctgaggctttggatttgacattgcatttgaccttttatgtantaatngacatgtgccnagggcaatgatgaatgaaaatctaccccccaaatcnagcatcctgancaactcttgatnatcntattgagtcaatggtaggcatttcctatcactgnttcnttcaananancactacttnttttactnaacggatccaaaaanaaaattgcntngacccnactaatttcaaangcntttaataataatattttnaaaanncnccttntccccnngncgg

SEQ ID NO: 120 - DNA, 1341 bp, Homo Sapiens
  misc_feature (946)..(949): n is a, c, g, or t
  misc_feature (951)..(952): n is a, c, g, or t
  misc_feature (954)..(957): n is a, c, g, or t
  misc_feature (959)..(964): n is a, c, g, or t
  misc_feature (966)..(966): n is a, c, g, or t
  misc_feature (970)..(970): n is a, c, g, or t
ttaactgaattacctataaataggcgtatcacgaggccctttcgtcttccctcgagaaatcataaaaaatttatttgctttgtgagcggataacaattataatagattcaattgtgagcggataacaatttcacacagaattcattaaagaggagaaattaactatgagaggatcgcatcaccatcaccatcacggtcgacccacgcgtccgcccacgcgtccggccgcggggggacaagaacgtcactatgggtcagagcagcgcacgcatgaagctgaattgggctgtggcagctggagccgaggatccaggccccgccgtggcgggcatcctctccatccagaacatgacgacattgctggccaatgcctccttgaacctgcattccaagaagcaagccgaactggaggagatatatgaaagcagcatccgtggtgtccaactcagacgcctctctgccgtcaactccatctttctgagccacaacaacaccaaggaactcaactcccccatccttttcgccttctcccaccttgagtcctccgatggggaggcgggaagagaccctcctgccaaggacgtgatgcctgggccacggcaggagctgctctgtgccttctggaagagtgacagcgacaggggagggcactgggccaccgagggctgccaggtgctgggcagcaagaacggcagcaccacctgccaatgcagccacctgagcagctttgcgatccttatggctcattatgacgtggaggactggaagctgaccctgatcaccagggtgggactggcgctgtcactcttctgcctgctgctgtgcatcctcactttcctgctggtgcggcccatccagggctcccgcacaccatacacctgcacctctgcatctgcctcttcgtgggctccaccatcttcctggccggcatgaaaaacaaaggggnnnngnngnnnncnnnnnncnccgngggcccgcgcgccggccccccccaccacccgccccaacccccacacccacaccacaacacccaaaacaccccccaacaccacacgcaccaacccccactcccatcacacccccccacaaacacccatacaccaccacacaccacctccaatcactcgcccacaaccacataaccaaaccattcctcccccaaccccctccatacccccaacccctcacctccaaccacccccacacccttccactcacacctcaatcacgaccacccacgcccacacgagctaatcaccttcacaccaaaacctacacacccacttcctcacaacctacaccctcctaaccctaccgacaccacgccactacacaaaccaa

SEQ ID NO: 121 - DNA, 1483 bp, Homo Sapiens
cccctgagagatactagagaggatgcatcaccatcaccatcacggtcgacccacgcgtccggagaagtcagccacagagtcgacgccaggagaaaggggggaggagaagccgttggatggacaggaacacagggagaggccggagggggaaacaggggatttgggcaagagagaagatgtaaaaggtgaccgggagcttcgaccagggcctcgagatgagccacggtccaatgggcgacgagaggaaaagacagagaagccccggttcatgttcaatatcgccgatggtggcttcacagagcttcacacactgtggcagaatgaggaacgggcagctatttcctcggggaaactcaatgagatctggcacagaagacatgactattggcttctggctgggattgtcctccatggctatgcacggtggcaggacatccagaatgatgctcaatttgccattatcaacgagccatttaaaactgaagccaataaggggaactttctggagatgaaaaataagttcctggcccggaggttcaagctcctggagcaggcgctggtgattgaggagcagctgcggcgggcggcctacctgaacctgtcgcaggagccggcgcaccccgccatggccctccacgcccgcttcgccgaggccgagtgcctggccgagagccaccagcacctctccaaggagtcgctggcggggaacaagccggccaacgccgtcctgcacaagggtaagggccgcggcggccccgcgcgggggagggcccacaacgctgcttctgaaccagctggaggagttgctgagcgacatgaaggcggacgtgacccgcctggcagccacgctgtcccgaatacccccatcgcagcccgccttcagatgtccgagcgcagcatcctcagccggctggccagcaagggcacggagcctcacccacaccggcctacccgccgggtccctagctacactcccggggtaaggggcgggccttctccccccacccctaggggcccttggccgccctaggcccaatacagtcaaagcccgcaggtccttctctcaaccccccccacggcccccccgagcttggaaaaaagcaaaataaccgtacgccacgcttcctccacgccccgtaccccatcccctccacccccctacccccctatcacactccccacttcatctaccatctccccacttcaactcatcacacctctccctcttcctacatcctcactactacacctatcctcacacccttcaaacccctcaccacccacccaccctttcacaccctactctcccatcctcactacttccccaataccactccattccactccccatcacactattccctcacccaacctccctttacaacattcctaccaccccctctcaaactctttacccatcaccttccccacaactctcatcatccccatccttgcctcacctcccttccctccattctacccc

SEQ ID NO: 122 - DNA, 1401 bp, Homo Sapiens
gccccttaagaatactagagaggatgcataccatcaccatcacggtcgacccacgcgtccgatcaccatggcggctgggaccctgtacacgtatcctgaaaactggagggccttcaaggctctcatcgctgctcagtacagcggggctcaggtccgcgtgctctccgcaccaccccacttccattttggccaaaccaaccgcacccctgaatttctccgcaaatttcctgccggcaaggtcccagcatttgagggtgatgatggattctgtgtgtttgagagcaacgccattgcctactatgtgagcaatgaggagctgcggggaagtactccagaggcagcagcccaggtggtgcagtgggtgagctttgctgattccgatatagtgcccccagccagtacctgggtgttccccaccttgggcatcatgcaccacaacaaacaggccactgagaatgcaaaggaggaagtgaggcgaattctggggctgctggatgcttacttgaagacgaggacttttctggtgggcgaacgagtgacattggctgacatcacagttgtctgcaccctgttgtggctctataagcaggttctagagccttctttccgccaggcctttcccaataccaaccgctggttcctcacctgcattaaccagccccagttccgggctgtcttgggcgaagtgaaactgtgtgagaagatggcccagtttgatgctaaaaagtttgcagagacccaacctaaaaaggacacaccacggaaagagaagggttcacgggaagagaagcagaagccccaggctgagcggaaagaggagaaaaaggcggctgcccctgctcctgaggaggaaatggatgaatgtgagccagcgctggctgctgagcccaaggccaaggaacccttcgctcaactgcccaagagaaccttggtgctggaagaaattaaaccgccaagggccccaagaaggaacacctctctgtggcaatgccaaattcctggaaacatttgaataacgaacgccgggtccccgggaaacacaaaaatacccttccacgaaaaacaccttctaacatcaacacgcgacaacccccctatacaaaacccctcacacgaaaaacaccaataaacaaccacccacaagcaacactttaagaaccacaccaaccacccacatatcgccataccaacactacacatcaccccagtaccctcattcaaacaaccccacacctcaccccaccaccaaacaccacacaccaatcccatgaccgcccacctcatccaataacacccatcaccaacaacgcacccaccactaacagatactcacaacacaatatatacaacaattcaataatcaataacccaccacctcccataacacaactctataaccac

SEQ ID NO: 123 - DNA, 1376 bp, Homo Sapiens
  misc_feature (1)..(1): n is a, c, g, or t
  misc_feature (954)..(954): n is a, c, g, or t
  misc_feature (1021)..(1022): n is a, c, g, or t
nccccggcactccccctaagaatacttgagaggatgcatcaccatcaccatcacggtcgacccacgcgtccggacgactccatgcgtatgtcccacctaaaggtcggctctgctgccgacatccccatcaacatctcagagacggatctcagcctgctgacggccactgtggtcccgccctcgggccgggaggagccctgtttgctgaagcggctgcgtaatggccacgtggggatttcattcgtgcccaaggagacgggggagcacctggtgcatgtgaagaaaaatggccagcacgtggccagcagccccatcccggtggtgatcagccagtcggaaattggggatgccagtcgtgttcgggtctctggtcagggccttcacgaaggccacacctttgagcctgcagagtttatcattgatacccgcgatgcaggctatggtgggctcagcctgtccattgagggccccagcaaggtggacatcaacacagaggacctggaggacgggacgtgcagggtcacctactgccccacagagccaggcaactacatcatcaacatcaagtttgccgaccagcacgtgcctggcagccccttctctgtgaaggtgacaggcgagggccgggtgaaagagagcatcacccgcaggcgtcgggctccttcagtggccaacgttggtagtcattgtgacctcagcctgaaaatccctgaaattagcatccaggatatgacagcccaggtgaccagcccatcgggcaagacccatgaggccgagatcgtggaaggggagaaccacacctactgcatccgctttgttcccgctgagatgggcacacacacagtcagcgtgaagtacaagggccagcacgtgcctgggagccccttccagttcaccgtggggcccctaggggaagggggagcccaccaggtccgagctgggggcctggcctgnagaagctgaagctggagtgcagcccgaatcagtatctgaacccggaagcctggtgctggaggcctgnnccatgctgtcaagggcccagcaaggctgaaatctcttttgaggaccgcaaagacgctcccctggggtggggctttatgtggtccaggaaccagggaactaccaagtctcagtcaagttcaacgagaaaccaattcccaaaaccccccttcgggggcccggggctttccccttgggggacccccccccccccctgtttcaacctctcaggatcggggctaaaggccacccccccccccttttcagacacctaacaggcccacagggggaaacaagccaagggcccccccccccaacccctggaagaggcttctccaaaaattaccaaaaacatgtgtccgccctctccccccaga

SEQ ID NO: 124 - DNA, 1166 bp, Homo Sapiens
  misc_feature (932)..(932): n is a, c, g, or t
  misc_feature (941)..(941): n is a, c, g, or t
  misc_feature (954)..(954): n is a, c, g, or t
  misc_feature (956)..(956): n is a, c, g, or t
  misc_feature (978)..(978): n is a, c, g, or t
  misc_feature (984)..(984): n is a, c, g, or t
  misc_feature (986)..(986): n is a, c, g, or t
  misc_feature (988)..(988): n is a, c, g, or t
  misc_feature (995)..(995): n is a, c, g, or t
  misc_feature (1001)..(1001): n is a, c, g, or t
  misc_feature (1005)..(1005): n is a, c, g, or t
  misc_feature (1010)..(1010): n is a, c, g, or t
  misc_feature (1035)..(1035): n is a, c, g, or t
  misc_feature (1075)..(1075): n is a, c, g, or t
  misc_feature (1096)..(1096): n is a, c, g, or t
  misc_feature (1110)..(1110): n is a, c, g, or t
  misc_feature (1112)..(1112): n is a, c, g, or t
  misc_feature (1123)..(1123): n is a, c, g, or t
  misc_feature (1137)..(1137): n is a, c, g, or t
  misc_feature (1144)..(1145): n is a, c, g, or t
  misc_feature (1147)..(1147): n is a, c, g, or t
  misc_feature (1150)..(1150): n is a, c, g, or t
  misc_feature (1157)..(1157): n is a, c, g, or t
  misc_feature (1160)..(1160): n is a, c, g, or t
  misc_feature (1163)..(1163): n is a, c, g, or t
tagagaaattactatgagaggatcgcatcaccatcaccatcacggatcctatttaggtgacactatagaatcgtcgacccacgcgtccgggcctggctcctggccgccgtctgggtcctggcacccgcctctccctggctcgaatgccccctccactcccgacccgggtggatttctccctggctggggcactcaatgctggcttcaaggagacccgggccagtgagcgggcagagatgatggagctcaatgaccgctttgccagctacatcgagaaggttcgcttcctggaacagcaaaacaaggcgctggctgctgagctgaaccagctgcgggccaaggagcccaccaagctggcagacgtctaccaggctgagctgcgagagctgcggctgcggctcgatcaactcaccgccaacagcgcccggctggaggttgagagggacaatctggcacaggacctggccactgtgaggcagaagctccaggatgaaaccaacctgaggctggaagccgagaacaacctggctgcctatagacaggaagcagatgaagccaccctggcccgtctggatctggagaggaagattgagtcgctggaggaggagatccggttcttgaggaagatccacgaggaggaggttcgggaactccaggagcagctggcccgacagcaggtccatgtggagcttgacgtggccaagccagacctcaccgcagccctgaaagagatccgcacgcagtatgaggcaatggcgtccagcaacatgcatgaagccgaagagtggtaccgctccaagtttgcagacctgacagacgctgctgcccgcaacgcggagctgctccgccaggccaagcacgaagccaacgactaccggcgccagttgcagtccttgacctgcgacctggagtctctgcgcggcacgaacgantccttgganaggcaaatgcccnancaggaagaacggcacgtgcggnaggcgncnanttatcangaagcnctgncccgnctgaagaaaaagggcaaaacctcangaacaaatggcccccccttgcaggaatacaagaactgctnatgtcagctggcctgaaatcnaaatccccctaagnanctgctaagggnaagaaaacggatcncattccnngnaancttttcnacntgnaat

SEQ ID NO: 125 - DNA, 844 bp, Homo Sapiens
  misc_feature (692)..(692): n is a, c, g, or t
  misc_feature (760)..(760): n is a, c, g, or t
aagagaaatactatgagaggtcgcatcaccatcaccatcacggatcctatttaggtgacactatagaatcgtcgactctggaccttggctgtcactcagttgacaggtttttattctttctgccaggtacatcagatccatcaggtccgagctgtgttgactaccactgcttttcccttcgtctcagttatgtcttggaagaaggctttgcggatccccggagaccttcgggtagcaactgtcaccttgatgctggcgatgctgagctccctactggctgagggcagagactctcccgaggatttcgtgtaccagtttaagggcatgtgctacttcaccaacgggacggagcgcgtgcgtcttgtaaccagacacatctataaccgagaggagtacgcgcgcttcgacagcgacgtgggggtgtaccgcgcggtgacgccgcaggggcggcctgatgccgagtactggaacagccagaaggaagtcctggaggggacccgggcggagttggacacggtgtgcagacacaactacgaggtggcgttccgcgggatcttgcagaggagagtggagcccacagtgaccatctccccatccaggacagaggccctcaaccaccacaacctgctggtctgctcggtgacagatttctatccaggccagatcaaagtccggtggtttcggaatgatcnaggagagacagccggcgttgtgtccacccccctttataggaatggtgactggactttccagaatctgntgatgctggaaatgactccccagcgtggagatgtctacacctgccacgtggagcaccccagcctccagagcccccatcacgtgg

SEQ ID NO: 126 - DNA, 709 bp, Homo Sapiens
agaaattactatgagaggatcgcatcaccatcaccatcacggatcctatttaggtgacactatagaatcgtcgacccacgcgtccgcccacgcgtccgatttccacttcccgaaatgaagcaaagagcggtagacaggagtcatcccttcttgtggctcccaacctggggcagccccctgcctccctttagatgggcaatcggcttagaaagtggaggggaagccagtgtggatctactcacagaatgttcttttggtttccagccaggattgctacagttgtgattggaggagttgtggccatggcggctgtgcccatggtgctcagtgccatgggcttcactgcggcgggaatcgcctcgtcctccatagcagccaagatgatgtccgcggcggccattgccaatgggggtggagttgcctcgggcagccttgtggctactctgcagtcactgggagcaactggactctccggattgaccaagttcatcctgggctccattgggtctgccattgcggctgtcattgcgaggttctactagctccctgcccctcgccctgcagagaagagaaccatgccaggggagaaggcacccagccatcctgacccagcgaggagccaactatcccaaatatacctggggtgaaatataccaaattctgcatctccagaggaaaataagaaataaagatgaattgttgcaactct

SEQ ID NO: 127 - DNA, 1286 bp, Homo Sapiens
ccaagctacccccccctaagaaatactatagaggatcgcatcaccatcaccatcacggtcgacccacgcgtccgcttcagccaatcttcattgctcaagtgtctgaagcagccatggcagaagtacctgagctcgccagtgaaatgatggcttattacagtggcaatgaggatgacttgttctttgaagctgatggccctaaacagatgaagtgctccttccaggacctggacctctgccctctggatggcggcatccagctacgaatctccgaccaccactacagcaagggcttcaggcaggccgcgtcagttgttgtggccatggacaagctgaggaagatgctggttccctgcccacagaccttccaggagaatgacctgagcaccttctttcccttcatctttgaagaagaacctatcttcttcgacacatgggataacgaggcttatgtgcacgatgcacctgtacgatcactgaactgcacgctccgggactcacagcaaaaaagcttggtgatgtctggtccatatgaactgaaagctctccacctccagggacaggatatggagcaacaagtggtgttctccatgtcctttgtacaaggagaagaaagtaatgacaaaatacctgtggccttgggcctcaaggaaaagaatctgtacctgtcctgcgtgttgaaagatgataagcccactctacagctggagagtgtagatcccaaaaattacccaaagaagaagatggaaaagcgatttgtcttcaacaagatagaaatcaataacaagctggaatttgagtctgcccagttccccaactggtacatcagcacctctcaagcagaaaacatgcccgtcttcctgggagggaccaaaggcggccaggatataactgacttcccatgccaatttgtgtcttcctaaagagagcttaccccagagagtctgggcctgaatgtggactcatcccctaggcctggcagaaaggaaaaaaaaagggttttggaaacaggctaaaacccggacttttcctggtgcctaccccaagccccactgctgcccttaaggaaaaggctaaagggatctcctggcccatcgcccggaaaagtcagctcccttcctttcagggccaatccccaaccccttttggtaaaccagagccctcctccccctccctacccccttaaaaccccgccggacaaaacacccccccccatttggtgctcaaaaaaaccctcctgtatatccctcccacatcttaatggaaacccgccctcccacacaatt

SEQ ID NO: 128 - DNA, 1275 bp, Homo Sapiens
  misc_feature (756)..(756): n is a, c, g, or t
  misc_feature (1053)..(1053): n is a, c, g, or t
  misc_feature (1105)..(1105): n is a, c, g, or t
  misc_feature (1153)..(1153): n is a, c, g, or t
  misc_feature (1193)..(1195): n is a, c, g, or t
  misc_feature (1202)..(1202): n is a, c, g, or t
  misc_feature (1238)..(1238): n is a, c, g, or t
  misc_feature (1244)..(1245): n is a, c, g, or t
  misc_feature (1254)..(1255): n is a, c, g, or t
  misc_feature (1259)..(1263): n is a, c, g, or t
  misc_feature (1271)..(1271): n is a, c, g, or t
  misc_feature (1274)..(1275): n is a, c, g, or t
cctaagagatactatgagaggatcgcatcaccatcaccatcacggtcgacccacgcgtccgcttaccgtgagcgacaaagatgatttaaaagggaagtctagagttcctagtctccctcacagcacagagaagacaaaattagcaaaaccccactacacagtctgcaagattctgaaacattgctttgaccactcttcctgagttcagtggcactcaacatgagtcaagagcatcctgcttctaccatgtggatttggtcacaaggtttaaggtgacccaatgattcagctatttaaaaaaaaaagaggaaagaatgaaagagtaaaggaaatgattgaggagtgaggaaggcaggaagagagcatgagaggaaagaaagaaaggaaaataaaaaatgatagttgccattattaggatttaatatatatccagtgctttgcaagtgctctgcgcaccttgtctcactccatcctgacaataatcctgggaggtgtgtgcaattactacgactactctcttttttatagatcattaaattcagaactaaggagttaagtaacttgtccaagttgttcacacagtgaagggaggggccaagatatgatggctgggagtctaattgcagttccctgagccatgtgcctttctcttcactgaggactgccccattcttgagtggcaaacgtcactagtaaccagggtgtgccctagatatttatgatccaaactgagtcagttttggaaagtgaaagggnaaactacatataatccctccggggacatgagcaaaaactaggactgtccccagaacaatggtgacatacatatcatcacttaaattaaaatgcctatgagaaagaaagagggggaaaaccggcttgggggtggtgaagtccttgaccagccatgtcaaaaaaaggtaaagaagtcagaaaaagcctgaaccccctttggtttcattttcggaaaaaggtcccgagggaaaatttaaaactccaatttctcggtttgttccaaaaaggggattccttgtggtaccccaatggttcgtncatatttaaaggaatggcttgacctgaaattggaactttacaagagaaaagnatcacccccccggttataaaaaccccacataatttcccaaaattccantttcccaaaaagggccacaactcgggaaaaaaacaacaannngaggaangggggggcaactttaaaataaaaaaaaaaaaagggnaaaaanncccctttgnnaaannnnnaaaaaaanaann

SEQ ID NO: 129 - DNA, 1212 bp, Homo Sapiens
  misc_feature (1)..(1): n is a, c, g, or t
  misc_feature (918)..(918): n is a, c, g, or t
  misc_feature (944)..(944): n is a, c, g, or t
  misc_feature (947)..(947): n is a, c, g, or t
  misc_feature (972)..(972): n is a, c, g, or t
  misc_feature (999)..(999): n is a, c, g, or t
  misc_feature (1008)..(1008): n is a, c, g, or t
  misc_feature (1012)..(1012): n is a, c, g, or t
  misc_feature (1027)..(1027): n is a, c, g, or t
  misc_feature (1031)..(1031): n is a, c, g, or t
  misc_feature (1039)..(1039): n is a, c, g, or t
  misc_feature (1067)..(1067): n is a, c, g, or t
  misc_feature (1088)..(1088): n is a, c, g, or t
  misc_feature (1098)..(1098): n is a, c, g, or t
  misc_feature (1105)..(1105): n is a, c, g, or t
  misc_feature (1114)..(1114): n is a, c, g, or t
  misc_feature (1129)..(1129): n is a, c, g, or t
  misc_feature (1135)..(1135): n is a, c, g, or t
  misc_feature (1162)..(1162): n is a, c, g, or t
  misc_feature (1164)..(1164): n is a, c, g, or t
  misc_feature (1174)..(1174): n is a, c, g, or t
  misc_feature (1176)..(1176): n is a, c, g, or t
  misc_feature (1179)..(1179): n is a, c, g, or t
  misc_feature (1183)..(1184): n is a, c, g, or t
  misc_feature (1188)..(1188): n is a, c, g, or t
  misc_feature (1194)..(1195): n is a, c, g, or t
  misc_feature (1199)..(1200): n is a, c, g, or t
  misc_feature (1205)..(1205): n is a, c, g, or t
  misc_feature (1210)..(1210): n is a, c, g, or t
naatagagagattactatgagaggatcgcatcaccatcaccatcacggatcctatttaggtgacactatagaatcgtcgacccacgcgtccggtgaaattggggaggccactgagcacctgactcagctcgaggcagacctgacagatgtgcaagatgagaacttcaatgccaaccatgcactaagtggtctggagcgagataggcttgcacttaatctcacactgcggcagctcgaccagcatcttgacttgctcaaacattcaaacttcctgggtgcctatgacagcatccggcatgcccatagccagtctgcagaggcagaacgtcgtgccaatacctcagccctggcagtacctagccctgtgagcaactcggcaagtgctcggcatcggacagaggcactgatggatgctcagaaggaggacttcaacagcaaacacatggccaaccagcgggcacttggcaagctctctgcccatacccacaccctgagcctgacagacataaatgagctggtgtgtggggcaccaggggatgcaccctgtgctacaagcccttgtgggggtgccggctgtcgagatgaggatgggcagccgcgctgtgggggcctcagctgcaatggggcagcggctacagcagacctagcactgggccgggcccggcacacacaggcagagctgcagcgggcactggcagaaggtggtagcatcctcagcagagtggctgagactcgtcggcaggcaagcgaggcacagcagcgggcccaggcagccctggacaaggctaatgcttccagggggacaggtggaacaggccaaccaggaacttcaagaacttatccagagtgtgaaggacttcctcaaccaggagggggctgatcctgatagcattgaaatggtggccacacgggtgctanagctctccatcccagcttcagctgancanatccagcacctggcgggtgcgattngcaaaacgagtccggaacctggcaaangtggatgcnatcntggcactactgtaanaaangtgcgtcntgccaaacactactgcagaatgcacggnggcaagaacttggctgagatnaaaaacaaangcaaaangtacggccnccctgaagaaggccnccggcnaagggattgccagggccctcggggggnangggtgaaccngnaanaaannaacntttccnnttanngaaanaaggngg

SEQ ID NO: 130 - DNA, 1327 bp, Homo Sapiens
  misc_feature (858)..(858): n is a, c, g, or t
  misc_feature (928)..(928): n is a, c, g, or t
  misc_feature (944)..(944): n is a, c, g, or t
  misc_feature (972)..(972): n is a, c, g, or t
  misc_feature (995)..(995): n is a, c, g, or t
  misc_feature (1009)..(1009): n is a, c, g, or t
  misc_feature (1011)..(1011): n is a, c, g, or t
  misc_feature (1014)..(1014): n is a, c, g, or t
  misc_feature (1044)..(1044): n is a, c, g, or t
  misc_feature (1065)..(1065): n is a, c, g, or t
  misc_feature (1085)..(1085): n is a, c, g, or t
  misc_feature (1090)..(1090): n is a, c, g, or t
  misc_feature (1094)..(1094): n is a, c, g, or t
  misc_feature (1119)..(1119): n is a, c, g, or t
  misc_feature (1127)..(1127): n is a, c, g, or t
  misc_feature (1129)..(1129): n is a, c, g, or t
  misc_feature (1136)..(1136): n is a, c, g, or t
  misc_feature (1142)..(1142): n is a, c, g, or t
  misc_feature (1154)..(1154): n is a, c, g, or t
  misc_feature (1156)..(1156): n is a, c, g, or t
  misc_feature (1166)..(1166): n is a, c, g, or t
  misc_feature (1168)..(1168): n is a, c, g, or t
  misc_feature (1172)..(1172): n is a, c, g, or t
  misc_feature (1177)..(1177): n is a, c, g, or t
  misc_feature (1180)..(1180): n is a, c, g, or t
  misc_feature (1185)..(1186): n is a, c, g, or t
  misc_feature (1197)..(1198): n is a, c, g, or t
  misc_feature (1207)..(1207): n is a, c, g, or t
  misc_feature (1219)..(1219): n is a, c, g, or t
  misc_feature (1228)..(1228): n is a, c, g, or t
  misc_feature (1230)..(1230): n is a, c, g, or t
  misc_feature (1242)..(1242): n is a, c, g, or t
  misc_feature (1249)..(1250): n is a, c, g, or t
  misc_feature (1257)..(1258): n is a, c, g, or t
  misc_feature (1261)..(1261): n is a, c, g, or t
  misc_feature (1267)..(1267): n is a, c, g, or t
  misc_feature (1275)..(1275): n is a, c, g, or t
  misc_feature (1284)..(1284): n is a, c, g, or t
  misc_feature (1290)..(1291): n is a, c, g, or t
  misc_feature (1314)..(1316): n is a, c, g, or t
  misc_feature (1322)..(1322): n is a, c, g, or t
aatagagaaattactatgagaggatcgcatcaccatcaccatcacggatcctatttaggtgacactatagaatcgtcgacccacgcgtccgatgtaaagttagccctggacatggaaatcagtgcttacaggaaactcttagaaggcgaagaagagaggttgaagctgtctccaagcccttcttcccgtgtgacagtatcccgagcatcctcaagtcgtagtgtacgtacaactagaggaaagcggaagagggttgatgtggaagaatcagaggcgagtagtagtgttagcatctctcattccgcctcagccactggaaatgtttgcatcgaagaaattgatgttgatgggaaatttatccgcttgaagaacacttctgaacaggatcaaccaatgggaggctgggagatgatcagaaaaattggagacacatcagtcagttataaatatacctcaagatatgtgctgaaggcaggccagactgttacaatttgggctgcaaacgctggtgtcacagccagccccccaactgacctcatctggaagaaccagaactcgtggggcactggcgaagatgtgaaggttatattgaaaaattctcagggagaggaggttgctcaaagaagtacagtctttaaaacaaccatacctgaagaagaggaggaggaggaagaagcagctggagtggttgttgaggaagaacttttccaccagcagggaaccccaagagcatccaatagaagctgtgcaattatgtaaaattttcaactgtcttcctcaaaataaagaagtatggtaatctttacctgtatacagtgcagagccttctcagaagcacagaatatttttatatttccnttatgtgaaattttaagctgcaaatctgatggccttaatttcctttttgacactgaaagttttgtaaaanaaatcatgtccatacnctttgttgcaagatgtgaattattgacnctgaactaataactgtgtactgntcggaaggggtccncnaantttttgacttttttggaggggggtttttcntttttttaagtcttatgaggngggagggtaataacccctgngcgcntggngtatttgaaattgcccctctaaacnacatcctntnttttccngtaatnaaaacgggggtngngggggggaancntttncaaantgnacttnnacgaatttctnnaaaacaccnggttaatttttnaaaaaattntnaaggaattaccnccccggnncccgggnnggncccaantggtttgntttttcttntttttnnggggggggggggggggggggtcnnnaaaccngtttt

SEQ ID NO: 131 - DNA, 1360 bp, Homo Sapiens
  misc_feature (780)..(780): n is a, c, g, or t
  misc_feature (830)..(830): n is a, c, g, or t
  misc_feature (908)..(908): n is a, c, g, or t
  misc_feature (943)..(943): n is a, c, g, or t
  misc_feature (947)..(947): n is a, c, g, or t
  misc_feature (954)..(954): n is a, c, g, or t
  misc_feature (981)..(981): n is a, c, g, or t
  misc_feature (989)..(989): n is a, c, g, or t
  misc_feature (998)..(998): n is a, c, g, or t
  misc_feature (1000)..(1000): n is a, c, g, or t
  misc_feature (1027)..(1027): n is a, c, g, or t
  misc_feature (1034)..(1034): n is a, c, g, or t
  misc_feature (1038)..(1038): n is a, c, g, or t
  misc_feature (1052)..(1052): n is a, c, g, or t
  misc_feature (1054)..(1054): n is a, c, g, or t
  misc_feature (1073)..(1073): n is a, c, g, or t
  misc_feature (1082)..(1082): n is a, c, g, or t
  misc_feature (1092)..(1092): n is a, c, g, or t
  misc_feature (1097)..(1097): n is a, c, g, or t
  misc_feature (1100)..(1100): n is a, c, g, or t
  misc_feature (1109)..(1109): n is a, c, g, or t
  misc_feature (1118)..(1118): n is a, c, g, or t
  misc_feature (1121)..(1122): n is a, c, g, or t
  misc_feature (1129)..(1129): n is a, c, g, or t
  misc_feature (1135)..(1135): n is a, c, g, or t
  misc_feature (1142)..(1142): n is a, c, g, or t
  misc_feature (1147)..(1147): n is a, c, g, or t
  misc_feature (1151)..(1151): n is a, c, g, or t
  misc_feature (1159)..(1159): n is a, c, g, or t
  misc_feature (1162)..(1162): n is a, c, g, or t
  misc_feature (1182)..(1182): n is a, c, g, or t
  misc_feature (1185)..(1185): n is a, c, g, or t
  misc_feature (1189)..(1189): n is a, c, g, or t
  misc_feature (1202)..(1202): n is a, c, g, or t
  misc_feature (1207)..(1207): n is a, c, g, or t
  misc_feature (1210)..(1210): n is a, c, g, or t
  misc_feature (1220)..(1220): n is a, c, g, or t
  misc_feature (1224)..(1225): n is a, c, g, or t
  misc_feature (1231)..(1231): n is a, c, g, or t
  misc_feature (1233)..(1233): n is a, c, g, or t
  misc_feature (1243)..(1243): n is a, c, g, or t
  misc_feature (1248)..(1248): n is a, c, g, or t
  misc_feature (1257)..(1257): n is a, c, g, or t
  misc_feature (1262)..(1263): n is a, c, g, or t
  misc_feature (1268)..(1268): n is a, c, g, or t
  misc_feature (1275)..(1275): n is a, c, g, or t
  misc_feature (1279)..(1279): n is a, c, g, or t
  misc_feature (1294)..(1295): n is a, c, g, or t
  misc_feature (1309)..(1309): n is a, c, g, or t
  misc_feature (1317)..(1319): n is a, c, g, or t
  misc_feature (1323)..(1324): n is a, c, g, or t
  misc_feature (1330)..(1330): n is a, c, g, or t
  misc_feature (1344)..(1344): n is a, c, g, or t
  misc_feature (1356)..(1357): n is a, c, g, or t
agagaaattaactatgagaggatcgcatcaccatcaccatcacggatcctatttaggtgacactatagaatcgtcgacccacgcgtccggcatgtatcttgaaatgcttgtaaagaggtttctaacccaccctcacgaggtgtctctcacccccacactgggactcgtgtggcctgtgtggtgccaccctgctggggcctcccaagttttgaaaggctttcctcagcacctgggacccaacagagaccagcttctagcagctaaggaggccgttcagctgtgacgaaggcctgaagcacaggattaggactgaagcgatgatgtccccttccctacttccccttggggctccctgtgtcagggcacagactaggtcttgtggctggtctggcttgcggcgcgaggatggttctctctggtcatagcccgaagtctcatggcagtcccaaaggaggcttacaactcctgcatcacaagaaaaaggaagccactgccagctggggggatctgcagctcccagaagctccgtgagcctcagccacccctcagactgggttcctctccaagctcgccctctggaggggcagcgcagcctcccaccaagggccctgcgaccacagcagggattgggatgaattgcctgtcctggatctgctctagaggcccaagctgcctgcctgaggaaggatgacttgacaagtcaggagacactgttcccaaagccttgaccagagcacctcagcccgctgaccttgcacaaactccatctgctgccatganaaaagggaagccgcctttgcaaaacattgctgcctaaagaaactcagcancctcaggcccaattctgccacttctggtttgggttacagttaaaggcaaccctgaagggacttggcagtaaaaatccnagggcctcccctggggctggcactttcgtgtgcanctanagctttnaccttaaaaggaaattctctggggccnaaaaactntccaccaanancctccctgccgtttcgctgaatcccancaatttntccntaatttgaagggantntgaaaaaggaaaaggaaantgggggggnaaaatttggnggggnggntaaaaaaantgccccccntcnntattgcnaaaaantttcggntggantttnttcccccnccncggtttcccttttctgaaanttnttgngccctggtttttnaaaanaangggctttttnaaannaaaggntntgggaaattnccccnttggggganggctnntgggnccccccnaaantatggttaaggggannagggggggaaaaanttaaaaannnccgnntttttnttaaaagaaaaaanccccgggggggnnccc

SEQ ID NO: 132 - DNA, 868 bp, Homo Sapiens
  misc_feature (571)..(571): n is a, c, g, or t
  misc_feature (735)..(735): n is a, c, g, or t
atagagagatactatgagaggtcgcatcaccatcaccatcacggatcctatttaggtgacactatagaatcgtcgactctggaccttggctgtcactcagttcgagaggcggggtctgcaggaacaccagagaggccggactctgaccatggtgtccctgggctgtggctttgtgggccctgtggtaggaggctggtacaaggttttggatcggttcatccctggcaccaccaaagtggatgcactgaagaagatgttgttggatcaggggggctttgccccgtgttttctaggctgctttctcccactggtaggggcacttaatggactgtcagcccaggacaactgggccaaactacagcgggattatcctgatgcccttatcaccaactactatctatggcctgctgtgcagttagccaacttctacctggtcccccttcattacaggttggccgttgtccaatgtgttgctgttatctggaactcctacctgtcctggaaggcacatcggctctaagcctgcctcactccatcgtttccaccttgcagtgatgcagcttgaccctgnaacggtcagacaacctcctcaaagtgggcataccagtttccacggggttgggttgccggtcagagcttaagaggactagcaccctggcatgcccctcttcactctaaaatgtacgctgactgctttagagcccttgataatagtcttattcccacacatactangcactccataaatatctgttgaccttcatgacctatcaacttacaccatatcccacaatgccatctcccactctcatagaactttgtactctacctgctaagctcttgactcactcttaaaactccgaacctt

SEQ ID NO: 133 - DNA, 1384 bp, Homo Sapiens
gcatatatctgacttacctataaatggcgtatcacgaggccctttcgtcttcacctcgagaaatcataaaaaatttatttgctttgtgagcggataacaattataatagattcaattgtgagcggataacaatttcacacagaattcattaaagaggagaaattaactatgagaggatcgcatcaccatcaccatcacggtcgacccacgcgtccgcggccggactacgagattgagatttcggatgcttcagaggtagaaaaggaaattaataaagcccagaatgccatcgccggggaaggaatgggaatcagtcatgagctaatcaccctggagatcagctcccgagatgtcccggatctgactctaatagaccttcctggcataaccagagtggctgtgggcaatcagcctgctgacattgggtataagatcaagacactcatcaagaagtacatccagaggcaggagacaatcagcctggtggtggtccccagtaatgtggacatcgccaccacagaggctctcagcatggcccaggaggtggaccccgagggagacaggaccatcggaatcttgacgaagcctgatctggtggacaaaggaactgaagacaaggttgtggacgtggtgcggaacctcgtgttccacctgaagaagggttacatgattgtcaagtgccggggccagcaggagatccaggaccagctgagcctgtccgaagccctgcagagagagaagatcttctttgagaaccacccatatttcaaggatctgctggaggaaggaaaggccaccgttccctgcctggcacaaaactttaccaccgaacccggccgcgaatccgcaatgcaagctccattaactgaacctcgaaccccgttgatacatcccgcaatggacccccgaactccctcaggattttgttcagaacccaccgcataacacaacgctccttcttctcactaaaactcccccaccacactccacactcagaccccccagacctcacacaaccacaaatggcccaaccaccccaccctgacaacccacactgcagcccactctaaccagacacccccctgacgcaccccaccaccccccactcacaccttacacctacctctataacacaccgacgcacctcagctaattcaacttcaccgctattcacctctgcacacacacatcagactcccaacaagaacactacctcagcccaaccacctgtctcaagccctaaaatcccactgacagtctacgacctatcgcgcactacagtggatcccatcatctctactctactccatcacgcctacatacccagctttcacaccttcatcaaacacaccacacctagatactcaaccctatcagcatcacg

SEQ ID NO: 134 - DNA, 1063 bp, Homo Sapiens
  misc_feature (1)..(1): n is a, c, g, or t
  misc_feature (4)..(4): n is a, c, g, or t
  misc_feature (774)..(774): n is a, c, g, or t
  misc_feature (797)..(798): n is a, c, g, or t
  misc_feature (803)..(803): n is a, c, g, or t
  misc_feature (817)..(817): n is a, c, g, or t
  misc_feature (831)..(831): n is a, c, g, or t
  misc_feature (833)..(833): n is a, c, g, or t
  misc_feature (838)..(838): n is a, c, g, or t
  misc_feature (840)..(840): n is a, c, g, or t
  misc_feature (846)..(846): n is a, c, g, or t
  misc_feature (862)..(862): n is a, c, g, or t
  misc_feature (871)..(871): n is a, c, g, or t
  misc_feature (875)..(875): n is a, c, g, or t
  misc_feature (880)..(880): n is a, c, g, or t
  misc_feature (884)..(884): n is a, c, g, or t
  misc_feature (890)..(890): n is a, c, g, or t
  misc_feature (895)..(895): n is a, c, g, or t
  misc_feature (905)..(905): n is a, c, g, or t
  misc_feature (913)..(914): n is a, c, g, or t
  misc_feature (920)..(920): n is a, c, g, or t
  misc_feature (923)..(923): n is a, c, g, or t
  misc_feature (933)..(933): n is a, c, g, or t
  misc_feature (939)..(939): n is a, c, g, or t
  misc_feature (946)..(946): n is a, c, g, or t
  misc_feature (950)..(950): n is a, c, g, or t
  misc_feature (957)..(958): n is a, c, g, or t
  misc_feature (969)..(969): n is a, c, g, or t
  misc_feature (972)..(973): n is a, c, g, or t
  misc_feature (975)..(976): n is a, c, g, or t
  misc_feature (990)..(990): n is a, c, g, or t
  misc_feature (993)..(994): n is a, c, g, or t
  misc_feature (998)..(998): n is a, c, g, or t
  misc_feature (1029)..(1029): n is a, c, g, or t
  misc_feature (1038)..(1039): n is a, c, g, or t
  misc_feature (1043)..(1043): n is a, c, g, or t
  misc_feature (1050)..(1050): n is a, c, g, or t
  misc_feature (1056)..(1057): n is a, c, g, or t
naantagagaaattactatgagaggatcgcatcaccatcaccatcacggatcctatttaggtgacactatagaatcgtcgacccacgcgtccgccccttccctctctcccctgtcctctctctccgggctcccaccgccgccgcgggccggggagccaccggccgccaccatgagttccttcagctacgagccgtactactcgacctcctacaagcggcgctacgtggagacgccccgggtgcacatctccagcgtgcgcagcggctacagcaccgcacgctcagcttactccagctactcggcgccggtgtcttcctcgctgtccgtgcgccgcagctactcctccagctctggatcgttgatgcccagtctggagaacctcgacctgagccaggtagccgccatcagcaacgacctcaagtccatccgcacgcaggagaaggcgcagctccaggacctcaatgaccgcttcgccagcttcatcgagcgcgtgcacgagctggagcagcagaacaaggtcctggaagccgagctgctggtgctgcgccagaagcactccgagccatcccgcttccgggcgctgtacgagcaggagatccgcgacctgcgcctggcggcggaagatgccaccaacgagaagcaggcgctccagggcgagcgcgaagggctggaggagaccctgcgcaacctgcaggcgcgctatgaaaaggaagtgctgaaccgcgaggacgccgaaggccgggctgatggaagcgcgcaaaaggcgccgaacnaggcggcgctcgctcgcgccganntcganaaagcgcattcaanagcttgaatgggangnaaatntntttttntgaaaaaaagtggacnaagaagaanaatngcccnaaanttgganggcgnaaaattccantaaggcgnnaaaatnttncgggggaaangggaanttgaaanaagncccgaanntttttccgccnggnntnnaaaggaaatccccnccnnaaanaaaaaaaaaacttggcccccaaaaaaaaatngcaaaaatnncttnaagaaangggttnnaaaaaa

SEQ ID NO: 135 - DNA, 1259 bp, Homo Sapiens
atcttaccccccatacccccccttagagatactatagaggatgcatcaccatcaccatcacggtcgacccacgcgtccggaacacagagaagagattgatttgtcttcagttccatctttgcctgtgcctcatcctgctcagacccagaggccttcctctgattcagggtgttcacatgacagtgtactgtcaggacagagaagtttgatttgctccatcccacaaacatatgcatccatggtgacctcatcccatctgccacagttgcagtgtagagatgagagtgttagtaaagaacagcatatgattccttctccaattgtacaccagccttttcaagtcacaccaacacctcctgtggggtcttcctatcagcctatgcaaactaatgttgtgtacaatggaccaacttgtcttcctattaatgctgcctctagtcaagaatttgattcagttttgtttcagcaggatgcaactctttctggtttagtgaatcttggctgtcaaccactgtcatccataccatttcattcttcaaattcaggctcaacaggacatctcttagcccatacacctcattctgtgcataccctgcctcatctgcaatcaatgggatatcattgttcaaatacaggacaaagatctctttcttctccagtggctgaccagaattacagtcagccttcgtctcagtaccacctattacatatggtccctcccattcagggtctgctacaaagctttcccacaagttctcatcccttgggtaatcaccgctttctgggcaccatctcctcaatttcaccaatgccttacaaattcctaattaggaaatggcctattcccgtttcaacccccaaaagggttttggaaaagccccccctcaacaccaaaaaacgggccaaggggggtttttctccccctttccctaaaatgccccagtttgggggaccacccccttttccccccgattgggcacctgggaccttaaacccctaccccaaaacaacaaaccctttttttccaccctgtcgccccaaaatcttctttaaaaaaccacccttatttctctcttgggaacacccccaacttcctcctccaaaaaaaccccacaccacgcgcttctcctaccccccccttctcccaaaacaaacaaaacaccaaacactccaccaccccacctccccacttcactccacccaacacccctgcaaccacactccacactctccacacactcaaccctcatcaacacacc

SEQ ID NO: 136 - DNA, 1203 bp, Homo Sapiens
  misc_feature (828)..(828): n is a, c, g, or t
  misc_feature (831)..(831): n is a, c, g, or t
  misc_feature (853)..(853): n is a, c, g, or t
  misc_feature (894)..(894): n is a, c, g, or t
  misc_feature (986)..(986): n is a, c, g, or t
  misc_feature (1023)..(1023): n is a, c, g, or t
  misc_feature (1031)..(1032): n is a, c, g, or t
  misc_feature (1047)..(1047): n is a, c, g, or t
  misc_feature (1075)..(1075): n is a, c, g, or t
  misc_feature (1079)..(1079): n is a, c, g, or t
  misc_feature (1087)..(1087): n is a, c, g, or t
  misc_feature (1097)..(1097): n is a, c, g, or t
  misc_feature (1106)..(1106): n is a, c, g, or t
  misc_feature (1116)..(1116): n is a, c, g, or t
  misc_feature (1122)..(1122): n is a, c, g, or t
  misc_feature (1125)..(1125): n is a, c, g, or t
  misc_feature (1127)..(1127): n is a, c, g, or t
  misc_feature (1130)..(1130): n is a, c, g, or t
  misc_feature (1139)..(1140): n is a, c, g, or t
  misc_feature (1143)..(1144): n is a, c, g, or t
  misc_feature (1148)..(1148): n is a, c, g, or t
  misc_feature (1153)..(1153): n is a, c, g, or t
  misc_feature (1161)..(1161): n is a, c, g, or t
  misc_feature (1175)..(1176): n is a, c, g, or t
  misc_feature (1189)..(1189): n is a, c, g, or t
  misc_feature (1195)..(1195): n is a, c, g, or t
  misc_feature (1198)..(1198): n is a, c, g, or t
  misc_feature (1203)..(1203): n is a, c, g, or t
tagagaaattaactatgagaggatcgcatcaccatcaccatcacggatcctatttaggtgacactatagaatcgtcgacccacgcgtccgccagcggggagttaccatctgaacctctccagccacttccgctggtcggcgctgcaggtgtccgtgggcctgtacacgtccctgtgccagtacttcagcgaggaggacatggggtggcggacagaggggctgctgcccctggaggagacctcgccccgccaggccgtctgcctcacccgccacctcaccgccttcggcgccagcctcttcgtgcccccaagccatgtccgctttgtgtttcctgagccgacagcggatgtaaactacatcgtcatgctgacatgtgctgtgtgcctggtgacctacatggtcatggccgccatcctgcacaagctggaccagttggatgccagccggggccgcgccatccctttctgtgggcagcggggccgcttcaagtacgagatcctcgtcaagacaggctggggccggggctcaggtaccacggcccacgtgggcatcatgctgtatggggtggacagccggagcggccaccggcacctggacggcgacagagccttccaccgcaacagcctggacatcttccggatcgccaccccgcacagcctgggtagcgtgtggaagatccgagtgtggcacgacaacaaagggctcagccctgcctggttcctgcagcacgtcatcgtcagggacctgcagacggcacgcagcgccttcttcctggtcaatgactggctttcggtggagacggaggccaacgggggcctggtggaaaangangtgctggccgcgagcgacgcancccttttgcgcttccggcgcctgctggtggctgaactgcancgtggcttctttgacaagcacatctggctctccatatgggaaccggccgcctcgtaaccgtttcactcgcatccaaaagggccacctgctgngttctcctcatctgcctcttcctgggggccaaagccntgtggtanngggcttgttggcaantctgcctaaaacacggggcatgtttcangctnaacccctnaacgttcaanaaatccctnttggcctggngtccancgngnttnttatcccgnnaanntggncatcntttttttnttccggaattcccnnaaaaaggggttgnaaaccnaancccan

SEQ ID NO: 137 - DNA, 1417 bp, Homo Sapiens
cctaaggaatactatagaggtcgcatcaccatcaccatcacggtcgacccacgcgtccgggcacagagagtgtgcagggtggtccttgtccctgcccaagctgcaagaggctctgcgaaggtctctcctgcccctgtccaccttgcacagtcctagccgggggaggaggggagaaatctggcgtgccaggagctggcaactgcccagcccttcctggatgtgggactgaggagtccgtcctgaaccgaagcatgatcctgttagctcttccagctctccaggcgccaacaaccatatggtctcgctccccacccgggctcaccttcagaccagcggcagcgctcacccaccacgcctgccagggaagctcagtcccaacagaatccagagagggcccaccacatgtgcctgcctgtgacggcctgtgacagggccccagccagggccaacgagctggaggggcccaaggagctgggtgcagcgctggggccccggacacccgctctgctgcaggagaatggctactcatcacacgctgtggatgggactggccctgctgggggtgctgggcgacctgcaggcagcaccggaggcccaggtctccgtgcagcccaacttccagcaggacaagttcctggggcgctggttcaacgcgggcctcgcctccaactcgagctggctccgggagaaaaaagcggcgttccccctgtgccactctgtggggtcccccgccacatcaggcggcctccaccccgcactccaccttactcacgacaaacccctggcgagaccctccacacgccgctccaactcccaacccccctcttctccttacctaaccaacaacccctctgaccaaccccccaatcacgtttctcggcaaccctacccccacccacctccaccctctcctcaccccaccctccaccctagccaccgacgcctcccatccccctacccctctcttccccatctccctcccctcccctccacccccccccctaaacctctccccctcaccccatcaaccttacctcgcacacatacttacttgcgtcccccacaccccccccccaccaccccacacatcacccccgtctcctacccaacatacagtcccaccatttcacaacccaccactgaaacccccacccttactccactatccctccctcccccacctccccctcccatccgtgtcttcccctcccacctccaccccacaacctcatccacaccccaccctccctactttcgaacatcccttcattccatcatccttcatcccaccgcccatcacacatgactcctcatcaccactctcacaccccccaatcacgaccccacatcgcttgctataacacctactccatctcacttcactctcacaaacccacttcgctctaccacagcttcc

SEQ ID NO: 138 - DNA, 1438 bp, Homo Sapiens
  misc_feature (796)..(796): n is a, c, g, or t
  misc_feature (1284)..(1284): n is a, c, g, or t
ccctaagaatactatgagaggatgcatcccatcaccatcacggtcgacccacgcgtccgcttcccacgcacgcagactcgcagacgccctctgctggaactgacacgcagacattcagcggctccgccgccaatgcaaaactcaaccctaccccaggcagcaatgctatctcagatgtcccaggagagaggagtacagccagcacctttcctacagacccagtttccccattgacaaccaccctcagccttgcacaccacagctctgctgccttacctgcacgcacctccaacaccaccatcacagcgaacacctcagatgcctaccttaatgcctctgaaacaaccactctgagcccttctggaagcgctgtcatttcaaccacaacaataggtgatattaccctcagtcaggcagccacaccatccccatgtgcctggtgatgtgctctcacaagggccttccacccactctacctcgggctcctttctttaagttgcattaagtgtttgaatcctgagggtgatggaacagcaggaagatatttctctgcttagcagtgcaacagctgatgagatcaggatgtaattgttactgtcataattcatcagaaagcatgtgtgagaaacaaccacatctactagaactttttctcacaggggtttaggtcttagtaaggaaaagaacaagcccatcaaaggggctgtccatttgcagtggtgagcatcagacggctgatggcagagttcccgttaagcagtgagagggcgtggagataaaggaaagagaaactgangaatggctgcagcatggtggtatctgtggatcacaagtaagctgatcaaagcttgccagcccaccattctcctcaaattctccaacccaaatccagatgagcagagatctcctagcttaaccaaacacatggtccccccattattcaacttaaatgcctacctccccccaaaaactgcttaaattgttgcaaaaaaatgtgtaacccggatttaaaaaagggcaaaaacttccccaagttatcccgaaaaggaacccctttgaaatttcccgaatttttttaagaaaagaaaaaaaaaaatctcccccaagggggggatattttaaaataacactgggaaaacccaaaaaaagaacctttaaatatttttgggggggaagacccacccccgggcccccccccccataagggccccccaaaccttattatgtgttgtttttttgggggattataaaaaaaataaaaaacccctctttcaaagcgctcangagaaaaaacgcagaagaaactcccttcttgttatcttaaacactattgggaggaggtggttctctctcccagggggggagataaacatcataatctcttcctctccaccccccccccccacgcaaaacaaaccaccttctcacaaaacaccct

SEQ ID NO: 139 - DNA, 960 bp, Homo Sapiens
atgagaggatcgcatcaccatcaccatcacggatcctatttaggtgacactatagaatcgtcgaccatggcatccgccacagactcgcgctatgggcagaaggagtcctcggatcagaacttcgactacatgttcaagattctcatcatcggcaacagcagcgtgggcaagacgtccttcctcttccgctatgctgacgactcgttcacgcctgccttcgtcagcaccgtgggcatcgacttcaaggtcaagaccatctatcgcaacgacaagaggatcaagctgcagatctgggacacagcagggcaagagcggtaccggaccatcaccaccgcatactaccggggcgctatgggcttcatcctcatgtatgacatcaccaacgaggaatccttcaatgcagtgcaggactggtccacccagatcaagacctactcatgggacaatgcccaggtgctgctggtaggaaacaagtgtgacatggaggatgagcgggtggtgtcatcagaacgtggccggcagctagctgaccaccttgggttcgagttctttgaggcaagcgccaaggacaacattaacgtcaagcagacctttgagcgcctggtggatgtcatctgcgagaagatgtccgagtcgttggacacggcggaccctgcggtcacaggcgccaagcagggcccacagctcagtgaccagcaggtgccaccgcaccaggactgcgcctgctgagagccatcccactccctttcccctcttccctgtcttccccaccttcccccaactacccgggcctgacccggcccctaccagccacgggcacaagacccctgctcctgacttagcccgtcacccttatttattattgtagctatttatttatttattgaagatgtcccccaggggcccaggctcccctgcccgccccaagccctgcccctcctgtacatatagctctttccc

SEQ ID NO: 140 - DNA, 545 bp, Homo Sapiens
ctaagaaatactagagaggacgcatcaccatcaccatcacggtcgacccacgcgtccgggcgccgacaggatgggcaagtgtcgtggacttcgtactgctaggaagctccgtagtcaccgacgagaccagaagtggcatgataaacagtataagaaagctcatttgggcacagccctaaaggccaacccttttggaggtgcttctcatgcaaaaggaatcgtgctggaaaaagtaggagttgaagccaaacagccaaattctgccattaggaagtgtgtaagggtccagctgatcaagaatggcaagaaaatcacagcctttgtacccaatgacggttgcttgaactttattgaggaaaatgatgaagttctggttgctggatttggtcgcaaaggtcatgctgttggtgatattcctggagtccgctttaaggttgtcaaagtagccaatgtttctcttttggccctatacaaaggcaagaaggaaagaccaagatcataaatattaatggtgaaaacactgtagtaataaattttcatatgcc

SEQ ID NO: 141 - DNA, 951 bp, Homo Sapiens
tgagaggatcgcatcaccatcaccatcacggtcgacccacgcgtccggggggaccagaggttgaaccccacagtcacctatggcaacgactccttctcggccaaggcctcagtcagtgtgaccgcagaggacgagggcacccagcggctgacgtgtgcagtaatactggggaaccagagccaggagacactgcagacagtgaccatctacagctttccggcgcccaacgtgattctgacgaagccagaggtctcagaagggaccgaggtgacagtgaagtgtgaggcccaccctagagccaaggtgacgctgaatggggttccagcccagccactgggcccgagggcccagctcctgctgaaggccaccccagaggacaacgggcgcagcttctcctgctctgcaaccctggaggtggccggccagcttatacacaagaaccagacccgggagcttcgtgtcctgtatggcccccgactggacgagagggattgtccgggaaactggacgtggccagaaaattcccagcagactccaatgtgccaggcttgggggaacccattgcccgagctcaagtgtctaaaggatacggccgcgatccgcatgcgagctcgattagctgagcttggactcctgttgatagatccagtaatgacctcagaactccatctggatttgttcagaacgctcggttgccgccgggcgttttttattggtgagaatccaagctagcttggcgagattttcaggagctaaggaagctaaaatggagaaaaaaatcactggatataccaccgttgatatatcccaatggcatcgtaaagaacattttgaggcatttcagtcagttgctcaatgtacctataaccagaccgttcagctggatattacggcctttttaaagaccgtaaagaaaaataagcacaagttttatccgggcctttattcaca

SEQ ID NO: 142 - DNA, 937 bp, Homo Sapiens
atgagaggatcgcatcaccatcaccatcacggatcctatttaggtgacactatagaatcgtcgactatggcctctctactcgccaaggacgcctacctgcagagcctggccaagaagatctgctcccattcggccccggaacagcaggcgcgcacgcgggctggcaaaactcaaggctcagaaactgcagggcccccaaaaaagaaaaggaagaaaacacaaaagaaattccggaagcgagaagagaaggctgctgagcacaaggccaagtccttgggggagaaatctccagcagcctctggggccaggaggcctgaggcagccaaagaggaagcagcttgggcttccagctcagcagggaaccctgcagatggcctggccactgagcctgagtctgtctttgctctggatgttctgcgacagcgactgcatgagaagatccaggaggcccggggccagggcagtgccaaggagctgtcccctgccgccttggagaaaaggcggcggagaaagcaggaacgggaccggaagaagaggaagcgaaaggagctgtgggcgaaagagaaggccagtaaggctgaggaggccatggaggcccaggaggtggtggaggcaaccccagagggggcctgcacggagccgcgggagccgcccgggctgatcttcaataaggtggaggtgagcgaagacgagccggccagcaaggcgcagcgcagaaaagagaagaggcagagggtgaaggggaacctcacgccgctgaccgggaggaactaccggcagctgctggagcgcctgcaggcacggcagagccggctggacgagctgcgcggccaggatgaggggaaaggcgcaggagctggaggcgaagatgaagtggaccaacctcctctacaaggcggagggcgtgaagatccgtgacgacgaacgcctgctgcag

SEQ ID NO: 143 - DNA, 1294 bp, Homo Sapiens
  misc_feature (3)..(3): n is a, c, g, or t
  misc_feature (16)..(16): n is a, c, g, or t
  misc_feature (18)..(21): n is a, c, g, or t
  misc_feature (24)..(24): n is a, c, g, or t
  misc_feature (32)..(32): n is a, c, g, or t
  misc_feature (42)..(42): n is a, c, g, or t
  misc_feature (49)..(49): n is a, c, g, or t
  misc_feature (78)..(78): n is a, c, g, or t
  misc_feature (89)..(89): n is a, c, g, or t
  misc_feature (102)..(102): n is a, c, g, or t
  misc_feature (909)..(909): n is a, c, g, or t
  misc_feature (952)..(952): n is a, c, g, or t
  misc_feature (964)..(964): n is a, c, g, or t
  misc_feature (979)..(979): n is a, c, g, or t
  misc_feature (981)..(981): n is a, c, g, or t
  misc_feature (995)..(995): n is a, c, g, or t
  misc_feature (1023)..(1023): n is a, c, g, or t
  misc_feature (1025)..(1025): n is a, c, g, or t
  misc_feature (1027)..(1027): n is a, c, g, or t
  misc_feature (1029)..(1029): n is a, c, g, or t
  misc_feature (1056)..(1056): n is a, c, g, or t
  misc_feature (1069)..(1069): n is a, c, g, or t
  misc_feature (1079)..(1079): n is a, c, g, or t
  misc_feature (1091)..(1091): n is a, c, g, or t
  misc_feature (1097)..(1097): n is a, c, g, or t
  misc_feature (1104)..(1104): n is a, c, g, or t
  misc_feature (1129)..(1129): n is a, c, g, or t
  misc_feature (1139)..(1139): n is a, c, g, or t
  misc_feature (1155)..(1155): n is a, c, g, or t
  misc_feature (1162)..(1162): n is a, c, g, or t
  misc_feature (1164)..(1164): n is a, c, g, or t
  misc_feature (1170)..(1170): n is a, c, g, or t
  misc_feature (1176)..(1176): n is a, c, g, or t
  misc_feature (1180)..(1180): n is a, c, g, or t
  misc_feature (1182)..(1182): n is a, c, g, or t
  misc_feature (1200)..(1200): n is a, c, g, or t
  misc_feature (1220)..(1221): n is a, c, g, or t
  misc_feature (1229)..(1229): n is a, c, g, or t
  misc_feature (1247)..(1248): n is a, c, g, or t
  misc_feature (1253)..(1253): n is a, c, g, or t
  misc_feature (1255)..(1255): n is a, c, g, or t
  misc_feature (1266)..(1266): n is a, c, g, or t
  misc_feature (1269)..(1271): n is a, c, g, or t
  misc_feature (1280)..(1280): n is a, c, g, or t
  misc_feature (1285)..(1285): n is a, c, g, or t
  misc_feature (1289)..(1289): n is a, c, g, or t
ttnagaggaaaaattncnnnngangagggatngcatcaccantcaccantcacgggaatcctattttagggtgacacntatagaatcgntcgacccacgcgntccggaaagggcggtgggctccacctcggcctagaaggccagcgggagccgtaggaagccgtcgcgggaagctcagccgaattggagttggagcccccggattgcgctgaccctgagctctcagactccccagtacaatgactcaagcagaaattaagctctgttctttgttgctgcaagagcattttggagagattgtagaaaaaattggagtccatctgataagaaccggcagccagccactaagagtaattgcccatgacacaggaacatcactggatcaggtgaagaaagccctgtgtgtcctcgtccaacataacctgtgacactggagagctgattgttgaggagcttctgttgaacggcaaactgacaatgtcagctgttgtgaagaaagtggcagaccggctcacagagaccatggaggatggcaagaccatggactatgctgaagtatcaaacacatttgtgcgactggcagacacacactttgtacaacgctgcccttcggtacctaccactgagaattcagaccctgggccaccaccacctgcccccacacttgtcattaatgaaaaggacatgtacctggttcctaaactcagcttgatagggaaaggtaaaaggaggagatcatctgatgaagatgctgctggggagcccaaggccaagagaccaaaatatactacagataacaaggagcccattccagatgatgggatttattggcaggccaaccttgacagattccaccaacacttccgtgaccaagccattgtgagcgcagttgctaacaggatggaccanacaaagcagcgagattgtgcgaaccatgctccgaatgagtganatttaccacttncctctagtgctcccntncacccagccattgntcttccaatgaaatcttcaaatccctancngntnggctataacatctctaaccaagttctngatcaatatctcnctctgctggncaaaagaatccnctaaanttttttnggaaaatttgggcaacaggggtggnagaaatgttntttcctccaccccccntaaggcntnaacatnccttancccnancccccttgggaatccccnctaaaagaaaaaatttgggnncccctggncaaaaaaattccccccannttttncnaaaaaaacccnttnnnccaaaaccnggggnaaanttttt

SEQ ID NO: 144 - DNA, 1171 bp, Homo Sapiens
  misc_feature (847)..(847): n is a, c, g, or t
  misc_feature (882)..(882): n is a, c, g, or t
  misc_feature (936)..(936): n is a, c, g, or t
  misc_feature (953)..(953): n is a, c, g, or t
  misc_feature (956)..(956): n is a, c, g, or t
  misc_feature (962)..(962): n is a, c, g, or t
  misc_feature (964)..(964): n is a, c, g, or t
  misc_feature (969)..(969): n is a, c, g, or t
  misc_feature (976)..(976): n is a, c, g, or t
  misc_feature (1011)..(1011): n is a, c, g, or t
  misc_feature (1018)..(1018): n is a, c, g, or t
  misc_feature (1034)..(1035): n is a, c, g, or t
  misc_feature (1040)..(1040): n is a, c, g, or t
  misc_feature (1053)..(1053): n is a, c, g, or t
  misc_feature (1055)..(1055): n is a, c, g, or t
  misc_feature (1060)..(1060): n is a, c, g, or t
  misc_feature (1062)..(1062): n is a, c, g, or t
  misc_feature (1083)..(1083): n is a, c, g, or t
  misc_feature (1088)..(1088): n is a, c, g, or t
  misc_feature (1091)..(1091): n is a, c, g, or t
  misc_feature (1096)..(1096): n is a, c, g, or t
  misc_feature (1101)..(1101): n is a, c, g, or t
  misc_feature (1111)..(1111): n is a, c, g, or t
  misc_feature (1117)..(1117): n is a, c, g, or t
  misc_feature (1120)..(1120): n is a, c, g, or t
  misc_feature (1125)..(1125): n is a, c, g, or t
  misc_feature (1127)..(1127): n is a, c, g, or t
  misc_feature (1130)..(1130): n is a, c, g, or t
  misc_feature (1133)..(1133): n is a, c, g, or t
  misc_feature (1136)..(1136): n is a, c, g, or t
  misc_feature (1144)..(1144): n is a, c, g, or t
  misc_feature (1147)..(1147): n is a, c, g, or t
  misc_feature (1161)..(1161): n is a, c, g, or t
attgagaaaattactatgagaggatcgcatcaccatcaccatcacggatcctatttaggtgacactatagaatcgtcgacccacgcgtccgctaatccagagagtaaggtcttctatctgaaaatgaagggtgattacttccggtaccttgctgaagttgcgtgtggtgatgatcgaaaacaaacgatagataattcccaaggagcttaccaagaggcatttgatataagcaagaaagagatgcaacccacacacccaatccgcctggggcttgctcttaacttttctgtattttactatgagattcttaataacccagagcttgcctgcacgctggctaaaacggcttttgatgaggccattgctgaacttgatacactgaatgaagactcatacaaagacagcaccctcatcatgcagttgcttagagacaacctaacactttggacatcagacagtgcaggagaagaatgtgatgcggcagaaggggctgaaaactaaatccatacagggtgtcatccttctttccttcaagaaacctttttacacatctccattccttattccacttggatttcctatagcaaagaaacccattcatgtgtatggaatcaactgtttatagtcttttcacactgcagctttgggaaaacttcattccttgatttgtgtttgtcttggccttcctggtgtgcagtactgctgtagaaaagtattaatagcttcatttcatataaacataagtaactcccaaacacttatgtagaggactaaaaatgtatctggtatttaagtaatctgaaccagttctgcaagtgactgtgttttgtattactgtgaaaataanaaaatgtagttaattacaatttaaagagtattccncataacttcttaatttctacattccctcccttactcttcgggggtttcctttcngtaagcaacttttccangcncttaangnatccnttttagnaggaatccggaagtattaaattgaatggaaaagcncttgccntccctgtctaggggcnnaaatngaaaatggctccngnatccnanacggaggtcttgggtatctgnggcancanggganttccnttatcccccnttattngcngcggntnaantgnccncccccccnccnaaaaaaatcccctnaccccccccg

SEQ ID NO: 145 - DNA, 1385 bp, Homo Sapiens
gattacctataaataggcgtatcacgaggccctttcgtcttcacctcgagaaatcataaaaaatttatttgctttgtgagcggataacaattataatagattcaattgtgagcggataacaatttcacacagaattcattaaagaggagaaattaactatgagaggatcgcatcaccatcaccatcacggtcgacccacgcgtccgccgggcttcaccatgaactggccgcagtttgaggagtggtccgcagacctgaatcgaaccctcagccggagagagaagaagaaggccactgacggcgtcaccctgacgggcatcaaccagacaggcgaccagtctctgccgagtaagcccagcagcacccttaatgtcccgagcaaccccgcccagtctgcgcagtcacagtccagctacaaccccttcgaggatgaggacgacacgggcagcaccgtcagtgagaaggacgacactaaggccaaaaatgtgagcagctacgagaagacccagagctatcccaccgactggtcagacgatgagtctaacaaccccttctcctccacggatgccaatggggactcgaatccattcgacgacgacggccgcgatccgcatgcgagctcgattagctgagcttggactcctgttgatagatccagtaatgacctcagaactccatctggatttgttcagaacgctcggttgccgccgggcgttttttattggtgagaatccaagctagcttggcgagattttcaggagctaaggaagctaaaatggagaaaaaaatcactggatataccaccggtgatatatccccatggcatcgtaaaataaattttgaggcatttcagtcaagtgctcaatgtacctataaacaaaccggtcagctggatattacggccttttttaagaccgtaaagaaaaataaacacaagttttattccggccctttatctccattcttgcccgcctgaagaaaggcccatccgaaatttcccatgggcatgaaaaaacgggggaccgggggacaagggaaaaaggttcccccttggttaccccgttttccaggaacaaactgaaaccttttcctcccctctggagggaatacccacaaaattcccgggaagttctaacacaataattccacaaaaatgggccggttagaggggataacctgggcctattcccctaaggggtctatggaaaatagtctttccccccacccaacaccggggtggattcacacactttgattataagaggcgcaaaaggaaaattttccccccccgtttccgcggggtaaatatctcatagggcaacgacgccgttgacctgcccgaatagcgctctcccacagtggtgatctcgcttgacgacactata

SEQ ID NO: 146 - DNA, 1376 bp, Homo Sapiens
  misc_feature (614)..(614): n is a, c, g, or t
ctgagagatactagagaggatgcatcccatcaccatcacggtcgacccacgcgtccggaggcaaaggcggcgacagctcctcacccctggcctccccaggagccacggcggcgggagggccctaccccgcccgcccgaccgcggttttcccaccctggccgctcccgcagtggggagggacccaccggtttgcccagaccctcggctccaaccccgagcgcccgcctagcctcggagcccgcccctcgcctcttccttagcactcgcagttagaaaaggcgacaccgtagactaaggtcgggacccagacagaggccgagaaggtgcggggagctgggaccgggaggaggcaaatctcgcgagaacgccctcgttctccccgccccaccccgccccgtcgcgttcgggctctctcccggtccccacggctgctgccaggtgcggtgacgtcacggccgggggtcgcgcgccgaccgcgtccaggtgcagcgagcggatgaggaagcggtgcagaggagcttgggctcgctctccccccggaggctcggaacagcttgggcgggcgtttggtctggtttgtcgcctcagatggatcaaaaggtttctgctgatangcaaagttgccccactttccgcggcggcgacgcggagttactttctgcagcgaagcagcctcgaggaccttataggggaaaggcgtacataaagaaggcgaccgcacttgatttcgacctttatgggaggtccaaaatgctgccagtcccctcagtttacctgagcaagtagctacggatcacccggcattggcccttcggacttgaacgggagaaccctagccctactctcgtttttttcctttgaggcacatgaattaagatggacccaaatatcgatggttatatcatgggggggctctgcactcttccaagaggtttacctttggactttgtttccctcaaaaaccccaaaatttcttacatcccccgggtctccaacagacccctgttgcccacgcatttttgcattgggaacccttctcactttactttcctctccctcccccatattcttcatgtgctccggtccacccccccttcgagttcccccgacatcgtaaaatccgtggaaagtaaactcgagctcgcacttaaataatccaaaattcatgggcccccttttcgactctaaaaaaactagttcagctccaataattctacgtccttatccttaaaaaatgtcaatgaaggtcccttatactcatatcacccgcctccgtcgcacattactacctactctagtaaccaaaactctggctccgatgaggctggcatattctactaaaaactatctcttctactgctgtcaggcattacacc

SEQ ID NO: 147 - DNA, 1229 bp, Homo Sapiens
  misc_feature (1)..(1): n is a, c, g, or t
  misc_feature (976)..(976): n is a, c, g, or t
  misc_feature (986)..(986): n is a, c, g, or t
  misc_feature (994)..(994): n is a, c, g, or t
  misc_feature (998)..(998): n is a, c, g, or t
  misc_feature (1000)..(1000): n is a, c, g, or t
  misc_feature (1005)..(1005): n is a, c, g, or t
  misc_feature (1023)..(1023): n is a, c, g, or t
  misc_feature (1031)..(1031): n is a, c, g, or t
  misc_feature (1036)..(1036): n is a, c, g, or t
  misc_feature (1054)..(1054): n is a, c, g, or t
  misc_feature (1062)..(1062): n is a, c, g, or t
  misc_feature (1071)..(1071): n is a, c, g, or t
  misc_feature (1073)..(1073): n is a, c, g, or t
  misc_feature (1087)..(1087): n is a, c, g, or t
  misc_feature (1093)..(1093): n is a, c, g, or t
  misc_feature (1095)..(1095): n is a, c, g, or t
  misc_feature (1099)..(1099): n is a, c, g, or t
  misc_feature (1106)..(1106): n is a, c, g, or t
  misc_feature (1125)..(1125): n is a, c, g, or t
  misc_feature (1132)..(1132): n is a, c, g, or t
  misc_feature (1139)..(1139): n is a, c, g, or t
  misc_feature (1143)..(1143): n is a, c, g, or t
  misc_feature (1146)..(1147): n is a, c, g, or t
  misc_feature (1177)..(1177): n is a, c, g, or t
  misc_feature (1182)..(1182): n is a, c, g, or t
  misc_feature (1191)..(1191): n is a, c, g, or t
  misc_feature (1195)..(1195): n is a, c, g, or t
  misc_feature (1197)..(1197): n is a, c, g, or t
  misc_feature (1200)..(1200): n is a, c, g, or t
  misc_feature (1204)..(1204): n is a, c, g, or t
  misc_feature (1212)..(1212): n is a, c, g, or t
  misc_feature (1215)..(1217): n is a, c, g, or t
  misc_feature (1226)..(1226): n is a, c, g, or t
  misc_feature (1229)..(1229): n is a, c, g, or t
naatagagaaattactatgagaggatcgcatcaccatcaccatcacggatcctatttaggtgacactatagaatcgtcgacccacgcgtccgcctgcaggtattttatgcatggggtttgtaaggaaggagacaactgtcgctactcgcatgacctctctgacagtccgtatagtgtagtgtgcaagtattttcagcgagggtactgtatttatggagaccgctgcagatatgaacatagcaagccattgaaacaggaagaagcaactgctacagagctaactacaaagtcatcccttgctgcttcctcaagtctctcatcgatagttggaccacttgttgaaatgaatacaggcgaagctgagtcaagaaattcaaactttgcaactgtaggagcaggttcagaggactgggtgaatgctattgagtttgttcctgggcaaccctactgtggccgtactgcgccttcctgcactgaagcacccctgcagggctcagtgaccaaggaagaatcagagaaagagcaaaccgccgtggagacaaagaagcagctgtgcccctatgctgcagtgggagagtgccgatacggggagaactgtgtgtatctccacggagattcttgtgacatgtgtgggctgcaggtcctgcatccaatggatgctgcccagagatcgcagcatatcaaatcgtgcattgaggcccatgagaaggacatggagctctcatttgccgtgcagcgcagcaaggacatggtgtgtgggatctgcatggaggtggtctatgagaaagccaaccccagtgagcgccgcttcgggatcctctccaactgcaaccacacctactgtctcaagtgcattcgcaagtggaggagtgctaagcaatttgagagcaagatcataaagtcctgcccagaatgccggatcacatctaactttgtcattccaagtgagtactgggtggaaggaaaaagaaaaaanccaaaactcnttctgaantacnanggagncaatgaaccaacaaggcntgcaggtnttttnaatgaaggacgtgggaanctgcccanttggaaggnanctgttttttacaancatgcntncccntgatggnccgtaaaaaaggacccccnaaaaacnaaaaggngggnaanntccaagccaaaaaccggggcccaacaaagnaaccnctttcgggnaacncnttngggnaaaaaaanaannnccccccccnttn

SEQ ID NO: 148 - DNA, 1186 bp, Homo Sapiens
  misc_feature (866)..(866): n is a, c, g, or t
  misc_feature (947)..(947): n is a, c, g, or t
  misc_feature (978)..(978): n is a, c, g, or t
  misc_feature (985)..(985): n is a, c, g, or t
  misc_feature (996)..(996): n is a, c, g, or t
  misc_feature (1020)..(1020): n is a, c, g, or t
  misc_feature (1030)..(1030): n is a, c, g, or t
  misc_feature (1042)..(1042): n is a, c, g, or t
  misc_feature (1047)..(1047): n is a, c, g, or t
  misc_feature (1052)..(1052): n is a, c, g, or t
  misc_feature (1055)..(1055): n is a, c, g, or t
  misc_feature (1070)..(1070): n is a, c, g, or t
  misc_feature (1082)..(1083): n is a, c, g, or t
  misc_feature (1096)..(1096): n is a, c, g, or t
  misc_feature (1098)..(1098): n is a, c, g, or t
  misc_feature (1104)..(1104): n is a, c, g, or t
  misc_feature (1106)..(1107): n is a, c, g, or t
  misc_feature (1110)..(1110): n is a, c, g, or t
  misc_feature (1120)..(1120): n is a, c, g, or t
  misc_feature (1124)..(1124): n is a, c, g, or t
  misc_feature (1138)..(1138): n is a, c, g, or t
  misc_feature (1140)..(1140): n is a, c, g, or t
  misc_feature (1150)..(1150): n is a, c, g, or t
  misc_feature (1152)..(1153): n is a, c, g, or t
  misc_feature (1176)..(1178): n is a, c, g, or t
  misc_feature (1186)..(1186): n is a, c, g, or t
tagagaaattactatgagaggatcgcatcaccatcaccatcacggatcctatttaggtgacactatagaatcgtcgacccacgcgtccgcaaacattgaggaaagccaggcagtagaggccgctatggcgaacgttccgtgggcagaggtctgcgagaaattccaggcggcgctcgctctgtcgcgggtggaactgcataaaaatccggagaaggaaccatacaagtccaaatacagcgcccgggcgctactggaagaggtcaaggcgctgctcggccctgcgcctgaggacgaggatgagcggcctgaggccgaggacagcccgggtgccggtgaccacgccctggggctgccggctgaggtggtggagcccgaggggcccgtcgcccagcgagcggtgaggctggcagtcatcgagttccacctcggggtgaaccacatcgacacggaggagctgtcggcgggggaggagcacctggtgaaatgcctgcggctgctgcgcaggtaccggctctcgcacgactgcatctctctctgcatccaggcgcagaataacctgggtatcttgtggtctgaaagagaagaaattgaaactgcacaggcttacctagagtcatcagaagcactatataatcagtatatgaaagaggttgggagtcctcctcttgatcctactgagcgttttcttcctgaagaagagaaacttactgaacaagagagatcaaaaagatttgaaaaggtttatactcataacctatattacctagctcaagtctaccagcatctggaaatgtttgagaaggctgctcactattgccatagtacactaaaacgccagcttgagcacaatgcctaccatcctatanagtgggctatcaatgctgctaccttgtcacagttttacatcaataagctatgctttatggaggccaggcactgtttatcanctgctaatgtcatttttggtcaactggaaanatctcanccacaaaaaanactcctgaaactgaaggaaaattnccaaactttntcttcaaaaaanggggnaatancanggtgctgaatcaaanactgtttgattnnatgcaaaatgccnantttccntnnagnaaaaataagnaaantttgattttaaaanantttgaatttnanntttttgggaaaaaaaactttttnnnggggaaan

SEQ ID NO: 149 - DNA, 1134 bp, Homo Sapiens
  misc_feature (790)..(790): n is a, c, g, or t
  misc_feature (921)..(921): n is a, c, g, or t
  misc_feature (931)..(931): n is a, c, g, or t
  misc_feature (936)..(936): n is a, c, g, or t
  misc_feature (968)..(968): n is a, c, g, or t
  misc_feature (970)..(970): n is a, c, g, or t
  misc_feature (972)..(972): n is a, c, g, or t
  misc_feature (979)..(979): n is a, c, g, or t
  misc_feature (996)..(996): n is a, c, g, or t
  misc_feature (1013)..(1013): n is a, c, g, or t
  misc_feature (1030)..(1030): n is a, c, g, or t
  misc_feature (1034)..(1034): n is a, c, g, or t
  misc_feature (1037)..(1037): n is a, c, g, or t
  misc_feature (1071)..(1071): n is a, c, g, or t
  misc_feature (1076)..(1076): n is a, c, g, or t
  misc_feature (1078)..(1078): n is a, c, g, or t
  misc_feature (1082)..(1082): n is a, c, g, or t
  misc_feature (1101)..(1101): n is a, c, g, or t
  misc_feature (1104)..(1104): n is a, c, g, or t
  misc_feature (1109)..(1109): n is a, c, g, or t
  misc_feature (1114)..(1116): n is a, c, g, or t
  misc_feature (1119)..(1119): n is a, c, g, or t
  misc_feature (1121)..(1121): n is a, c, g, or t
  misc_feature (1128)..(1128): n is a, c, g, or t
  misc_feature (1131)..(1134): n is a, c, g, or t
tagagaaattactatgagaggatcgcatcaccatcaccatcacggatcctatttaggtgacactatagaatcgtcgacccacgcgtccgagctgaaggacatcattgagtacgcagagctcaaaacagacgtgttccagagcctgagggaagtgggcaatgccatcctcttctgcctcctcatagagcaagctctgtctcaggaggaggtctgcgatttgctccatgccgcacccttccaaaacatcttgcctagagtctacatcaaagagggggagcgcctggaggtccggatgaaacgtctggaagccaagtatgccccgctccacctggtccctctgatcgagcggctggggacccctcagcaaatcgccattgctcgcgagggtgacctcctgaccaaggagcggctgtgctgtggcctgtccatgttcgaggtcatcctgacccgcattcggagctacctgcaggaccccatctggcggggcccaccgcccaccaatggcgtcatgcacgtcgatgagtgtgtggagttccaccggctgtggagcgccatgcagttcgtgtactgcatccctgtgggaaccaacgagttcacagctgagcagtgtttcggcgatggcttgaactgggctggttgctccatcattgtcctgctgggccagcagcgtcgctttgacctgttcgacttctgttaccacctgctaaaagtgcagaggcaggacgggaaggatgaaatcattaagaatgtgcccctgaagaagatggccgaccggatcaggaagtatcanatcttgaacaatgaggtttttgccatcctgaacaaatacatgaagtccgtggagacagacagttccactgtggagcatgtgcgctgcttccagccaccccatccaccagtccttggccaccacttgctaancaaaaaatcntgcanacccttatctggaggaggaaaaaaaccagganananaaagccncagccagcctgccatangatccaactggaaaaangtgggggaaggacctgnaaanaancacctcccaaaaaatcacccttcctagggggggncctgngnatgntctcccaagaaatccccangcnggttnccccnnnccnanttaaaanaannnn

SEQ ID NO: 150 - DNA, 895 bp, Homo Sapiens
  misc_feature (813)..(814): n is a, c, g, or t
  misc_feature (871)..(871): n is a, c, g, or t
tactatgagaggtcgcatcaccatcaccatcacggatcctatttaggtgacactatagaatcgtcgactctggaccttggctgtcactcagttggccatctgctgggctatgtgttccatgaggttagaggctgtggctgccatgtccaccactctgtttctagcactgaatcagggcctggcacccagaaactacagaataaatatttattgagtgaatgcctagagactaatcatcagcgacgtaatcatgttatttgtccttttctacaacaaatgtttctcaaaggtcagaaatgagaagatgaaaccaggaccaacgtggattaaatagagaatcaaagctgtaaaactacaaatcattcttcaaatggagccccagatgcagtccatgactaagatctaccatggacccctggaccggcctgctagcccatgctccgaagttgatgacatcgaaggcacccctcccaaggaaatttcaactgcacgacccttactatgccccaattcagcaggaagcagttagagctgtcgtcagccaacctccgcaagagcacttgggttttcctgttgagaggggctactaagagacaggactagctggatttcctaggccaactaagaatccctaagcctagctgggaagttgaccacatccacctttaaacacgaggcttgcaacttagcttacacacaaccaatcaggtagtaaagagagctcactaaaatgctaactaggcaaaaacaggaaagtaagaaatagccaatcatctattgcctgagagcacagggggaaggacaatgatcggnnatataaccccagcatcgagccgcaatggctgtcccctttggtccctcccttgtatgnactctgttttactctataaatctg

SEQ ID NO: 151 - DNA, 1389 bp, Homo Sapiens
  misc_feature (831)..(831): n is a, c, g, or t
  misc_feature (1317)..(1317): n is a, c, g, or t
gggagatacttgagaggatcgcatcaccatcaccatcacggtcgacccacgcgtccggaaaaacaacaggaagcagcttacaaactcggtgaacaactgagggaaccaaaccagagacgcgctgaacagagagaatcaggctcaaagcaagtggaagtgggcagagattccaccaggactggtgcaaggcgcagagccagccagatttgagaagaaggcaaaaagatgctggggagcagagctgtaatgctgctgttgctgctgccctggacagctcagggcagagctgtgcctgggggcagcagccctgcctggactcagtgccagcagctttcacagaagctctgcacactggcctggagtgcacatccactagtgggacacatggtgagtggcagcccctggagcctaacaggagtccaggctctccaaggctgtggcagaagaccgtgaccttgagtggaagctggagggttgaaggccattagggagtaagagaggacaagagagtagggttcctgggagagtcatgggcctgagggtccaggttggcttcagaagtactatcttacttcttcattctttccacctcttccttcattccaggatctaagagaagagggagatgaagagactacaaatgatgttccccatatccagtgtggagatggctgtgacccccaaggactcagggacaacagtcaggtaccactgggatgtggctgggcaatgaaggagaggggactgagaacatggctgggtaccatggtaaaccagaagttgtgtctgaaaatagtaagaaactgggtgagtcttcagtgaatggagtangaagagggtgtcctctttcattgctttcttttctccctagttctgcttgcaaaggatccaccagggtctgattttttatgagaagctgctaagatcggatattttcccaggggagccttctctgctccctgataaccctgtgggccagcttcatgcctccctactgggctccagccaatcctgcaggtatgaaataggggcggggaggatggggccttgccggggtccaaaacaaagggttggggttaagggtttaaaaacttcctctaagggtcctatggccttcacaccgggggtccccttggaaaaccacaaatatcccaccccctccccaccacccaggcagcccccctctcccctttaaaaatttccccccccccgcccttttgtgtgaaccctccggcttctcccctaacaccaaccgtgtcctctaggccccttcagatagacccccacccttcgcccctaaccactaatttcaccccnagccgccgctccacaccttcaccccctcctcggacccctcccgaacccatccctcgtgtgaccttaccatac

SEQ ID NO: 152 - DNA, 1373 bp, Homo Sapiens
  misc_feature (1053)..(1053): n is a, c, g, or t
  misc_feature (1057)..(1059): n is a, c, g, or t
  misc_feature (1061)..(1061): n is a, c, g, or t
  misc_feature (1064)..(1065): n is a, c, g, or t
  misc_feature (1067)..(1068): n is a, c, g, or t
  misc_feature (1077)..(1077): n is a, c, g, or t
  misc_feature (1240)..(1240): n is a, c, g, or t
  misc_feature (1302)..(1302): n is a, c, g, or t
  misc_feature (1305)..(1305): n is a, c, g, or t
gaggatactatgagaggtcgcatcaccatcaccatcacggtcgacccacgcgtccgggacccaaatcctcgggccgccctggagcgccagcagctccgccttcgggagcggcaaaaattcttcgaggacattttacagccagagacagagtttgtctttcctctgtcccatctgcatctcgagtcgcagagacgtaagtcccaagtcctgagaagagggactggggtagggtagggaggatgtcctgtgggtcctgaatcttgtggcactctctcccctctggttttcttggccctctatgcttctaacttgggacctgacatgtaactctcactgtcctggtgtgcagcttgggtcctcctgacttgcccacttcttgatccgcagcccccataggtagtatctcatccatggaagtgaatgtggacacactggagcaagtagaacttattgaccttggggacccggatgcagcagatgtgttcttgccttgcgaagatcctccaccaaccccccagtcgtctggtatgcccctctgctttggggacttcagtgccagtcagccagagccggatgtcaggctctgaaacgaggctacaaggctgggctggggaagtacacaagtaagggctggaagtgggtgtttctaccaatgaaacagctgcctgttctgattttagggaagttgaccctgagggagaactgggttacacatctctaatccaaaattctgggaacggtcaatctcttctttaattttacatttgttatattaatataattagtcactataattaaaataatgtaaaattgtaatttttatatttggcaacttaagtaattttactcattataatgatattaatatgtattgaggaccctagtaaggtcccatactggacttaagaactctacatatattatctaatccttaaaacccctggccgggaaagggatttatctccatcttataacccgaaatatggctccaaaaatcagtcactttccacccaaaggaaataccggcactcggtccgtttgactttggccccncgcnnncnggnncnnccacccccncacaaacgccaccaccccgcggccaccaccgccccgcaaaaacccacggcaacccccacccccggccccaccccccccaccggccgcacaacacccccaccgccacccccccccccccccaccaacaaccaccacaccaccccccaccaaccccgcacccaangccacgggacaaaacacccccacaccacacaaacacaacaaccccccccacacaacccccanccnaccccccaacaccacccacacccccaaccacacaacccaccccaccaacccacccccccccaccacac

SEQ ID NO: 153 - DNA, 890 bp, Homo Sapiens
  misc_feature (650)..(651): n is a, c, g, or t
  misc_feature (659)..(659): n is a, c, g, or t
  misc_feature (689)..(690): n is a, c, g, or t
  misc_feature (734)..(734): n is a, c, g, or t
  misc_feature (740)..(740): n is a, c, g, or t
  misc_feature (745)..(745): n is a, c, g, or t
  misc_feature (754)..(755): n is a, c, g, or t
  misc_feature (766)..(766): n is a, c, g, or t
  misc_feature (780)..(780): n is a, c, g, or t
  misc_feature (797)..(797): n is a, c, g, or t
  misc_feature (819)..(820): n is a, c, g, or t
atactatgagaggtcgcatcaccatcaccatcacggatcctatttaggtgacactatagaatcgtcgactctggaccttggctgtcactcagttggggtagcgtcttcgctgttgcccttagggacggctgtgggcctgcggggggtgggggcccgaagcgccagagatggctgctcagcgagggatgcccagctccgccgtgagggtcctggaagaggcgttgggcatgggtttgacggcagccggggacgcgagggacacggcggacgcggtggcggctgagggcgcctactacctggaacaggtcaccataactgaagcatctgaagatgactatgaatatgaagagataccagatgacaattttagcatcccagaaggtgaagaagatctggcaaaagcaattcagatggcccaagaacaggctacagatactgaaattttggaacggaaaacagttcttccttcaaagcatgcagtacctgaagtaatagaagactttctctgcaatttcttgatcaaaatgggaatgaccagaactcttgattgctttcagtctgaatggtatgagttaatacagaaaggagtgactgaacttagaactgttgggaatgttccagatgtctacacccagattatgcttttggannatgagaancaaaatttaaagaaagattttgagcactanncaacagcagctgagtatgttattttttaaatgacattttcttcnttttcntttgnactaaatannagagttgagtngagctgatatatgntatataccagagccttnattttttgaaactgatttttcnntagtgtaagatgtgagagcttcttagcaatttattaaacgatgatcgactatccattatacttacacaga

SEQ ID NO: 154 - DNA, 1436 bp, Homo Sapiens
aatatactgacttacctataaataggcgtatcacgaggccctttcgtcttccctcgagaaatcataaaaaatttatttgctttgtgagcggataacaattataatagattcaattgtgagcggataacaatttcacacagaattcattaaagaggagaaattaactatgagaggatcgcatcaccatcaccatcacggtcgacccacgcgtccgcggccgcttctgtctcaaaagcatctgggctctgccgatctgcagggtttccactggggctctcaatcttgtggagtggttcttgttcttcaaacacagcaatcagcttgtctttatcttcaacaacatctgccaagacatcatctggatccaggattcctccatctgtatattctaagtgatgaatcttcacccagtaaccaggacccttctcccgggtcttcaggtaccgctgcagcgcctgctgggtgagctcgccgacgcgcagctggccctccttgcagggcaccacgatgcccgtcctgccgaagcacacggtcactttcatcctggcccccggcgaccacgccgggccgggccgaacaggtgtctgaccccgcgggcgcagcccccactctcggaggacgcccggggcgggtgggcccagagacccggggcgccgctccccggaacaccctgaggcccggaggctcgcggcagcgccccttccacctggccaggcggcaggtggcgggaatcggggaagggccgaccccgcaacagagttaacatccccgaagcccgtccggaccttcgggcgctattccccatggaaacattaattctccgacctacgactccctggtaaacagctctggcaacgacgcacacagtcccctacacagttaacccaaccgctccgtaacccaccacccctcataacactgcaacaccccacccctacaaccaccccatcaatcttttacactcccttatactcgcaccccagtacgccctcacccacaagcactcgaacaaaccccgctcctgcactcaatactgataagcctcgctctcctcaccaccattcaatgcacaacatcaaccaatacctagtcatcaagataattacacacctcacaattcccgaccgcaacagaccacagaatagcaacgccacgcataaccgtcactacaacatctaccattgcctcactacccgccaagcgccacatacacaaaactgccttcaacatggcacgacaaacaaacatatgactgacagcaccgcgccgccagtccatcctgccgacaaaacccactattctgcaaacaccaatacactcggacataaatatccatggaccttcacaccagcgaatttcacaaccacatcgtacaacatatcgtaacgcgctgatactcagaccacacgtcaccgctacgcataccttcctgctct

SEQ ID NO: 155 - DNA, 876 bp, Homo Sapiens
  misc_feature (2)..(2): n is a, c, g, or t
antagagaaattactatgagaggatcgcatcaccatcaccatcacggatcctatttaggtgacactatagaatcgtcgacccacgcgtccgcccacgcgtccggcgactcaccatcgtcagtgcgcaaccgttcgctaactgaaatgatggcgactggaacgccagagtctcaagcgcggttcggtcagtccgtgaaggggcttctcacggagaaggtgaccacctgtggtactgacgtaatcgcgctcaccaagcaggtgctgaaaggctcccggagctccgagctgctaggtcaggcagctcgaaacatggtactccaggaagatgccatcttgcactcagaagatagtttaaggaagatggcaataataacaacacatcttcaataccagcaagaagctattcagaagaatgttgaacagtcatcggatctacaggaccagttgaatcatctgttgaaatagaatgacatgtaagagtgctgtaggactcctttgcctaatgctgaggagtaaataccttacacagctgtcctctgggtttggttttctattttcttctccaaaagttaagttagaaaagttctgtgttagggccgggcgcggtagctcacgcctgtaatcccagcactttgggaggccgaggcgggtggatcacgaggtcaggagttcgagaccagcctggccaagatggtgaaaccccgtctctactaaaaatacaaagaattagctgggcgtggtggcgggcgcctgtaatcccagctactcgggaagctgaggcaagagaatcgcttgaacccaggaggtggaggttgcagtgagccaagatcgcgccactgcactccagcctgggcgacagagtgagattccatctcc

SEQ ID NO: 156 - DNA, 593 bp, Homo Sapiens
gggggtataagagatactatgagaggatgcatcccatcaccatcacggatcctatttaggtgacactatagaatcgtcgactctggaccttggctgtcactcagtttccctatgcattgcacagagatccgagatacttccccaaccccgaggagttccagcctgagcggttcttccccgagaatgcacaagggcgccattcatatgcctacgtgcccttctctgctggtcccaggaactgtataggtcaaaagtttgctgtgatggaagaaaagaccattctttcgtgcatcctgaggcacttttggatagaatccaaccagaaaagagaagagcttggtctagaaggacagttgattcttcgtccaagtaatggcatctggatcaagttgaagaggagaaatgcagatgaacgctaactatattattgggttgtgcctttatcatgagaaaggtctttattttaagagatccttgtcatttacaatttacagatcatgagttcaatatgcttgaatcccctagacctaatttttccttgatcccactgatcttgacatcaagtctaacaaagaaaaagttttgagttttgt

SEQ ID NO: 157 - DNA, 1020 bp, Homo Sapiens
  misc_feature (9)..(9): n is a, c, g, or t
  misc_feature (756)..(756): n is a, c, g, or t
  misc_feature (771)..(771): n is a, c, g, or t
  misc_feature (786)..(786): n is a, c, g, or t
  misc_feature (818)..(818): n is a, c, g, or t
  misc_feature (868)..(868): n is a, c, g, or t
  misc_feature (903)..(903): n is a, c, g, or t
  misc_feature (908)..(908): n is a, c, g, or t
  misc_feature (916)..(916): n is a, c, g, or t
  misc_feature (924)..(924): n is a, c, g, or t
  misc_feature (927)..(927): n is a, c, g, or t
  misc_feature (929)..(929): n is a, c, g, or t
  misc_feature (932)..(932): n is a, c, g, or t
  misc_feature (936)..(936): n is a, c, g, or t
  misc_feature (969)..(969): n is a, c, g, or t
  misc_feature (979)..(979): n is a, c, g, or t
  misc_feature (984)..(985): n is a, c, g, or t
  misc_feature (994)..(996): n is a, c, g, or t
  misc_feature (998)..(998): n is a, c, g, or t
  misc_feature (1001)..(1001): n is a, c, g, or t
  misc_feature (1005)..(1005): n is a, c, g, or t
  misc_feature (1008)..(1008): n is a, c, g, or t
tagagaaanttactatgagaggatcgcatcaccatcaccatcacggatcctatttaggtgacactatagaatcgtcgacccacgcgtccgggagaagcccaggccggccggaagaggagccgagcgcggccggaaggaaccgagcccgtccgaagggagcggagcgcagcctggcctggggcccggtcgagcccgcgccatggcggccgaggcgacagctgtggccggaagcggggctgttggcggctgcctggccaaagacggcttgcagcagtctaagtgcccggacactaccccaaaacggcggcgcgcctcgtcgctgtcgcgtgacgccgagcgccgagcctaccaatggtgccgggagtacttgggcggggcctggcgccgagtgcagcccgaggagctgagggtttaccccgtgaggtgggaggtcaggggtcagcctctccggtgcgcggatcggggtcaggggtcagccgcggggccctcaggatgctccatgttttcgcccccctcttgcgcccgcgcctggggcggggcggggccggcctggccgggagggggccggggccgcggcaggtagggccggccgcgggctgagcgcgcctggtgtgggtctgcagcggaggcctcagcaacctgctcttccgctgctcgctcccggaccacctgcccagcgttggcgaggagccccgggaggtgcttctgcggctgtacggagccatcttgcaggtgagggggttgtgagcgccgcancaccagtggctttanggcctgtcgcttacncgatgcgggtaatattgttcccgttgcgcaanttgaggacaccgaggttcacggtctgaataacacctcattacaccgaaancttgggcctgtattcccaaaacttttggaaagctnaagcnaaaagatnactttaancananganttcnaaaccaaccttgaaaaaaataattgaaaccccnttttttaaanaaaannaaaccaacnnntnaancttntgnttcaaaaacctc

SEQ ID NO: 158 - DNA, 953 bp, Homo Sapiens
atgagaggatcgcatcaccatcaccatcacggatcctatttaggtgacactatagaatcgtcgacccaccgtccgggcgtgatgtctcacagaaagttctccgctcccagacatgggtccctcggcttcctgcctcggaagcgcagcagcaggcatcgtgggaaggtgaagagcttccctaaggatgacccatccaagccggtccacctcacagccttcctgggatacaaggctggcatgactcacatcgtgcgggaagtcgacaggccgggatccaaggtgaacaagaaggaggtggtggaggctgtgaccattgtagagacaccacccatggtggttgtgggcattgtgggctacgtggaaacccctcgaggcctccggaccttcaagactgtctttgctgagcacatcagtgatgaatgcaagaggcgtttctataagaattggcataaatctaagaagaaggcctttaccaagtactgcaagaaatggcaggatgaggatggcaagaagcagctggagaaggacttcagcagcatgaagaagtactgccaagtcatccgtgtcattgcccacacccagatgcgcctgcttcctctgcgccagaagaaggcccacctgatggagatccaggtgaacggaggcactgtggccgagaagctggactgggcccgcgagaggcttgagcagcaggtacctgtgaaccaagtgtttgggcaggatgagatgatcgacgtcatcggggtgaccaagggcaaaggctacaaaggggtcaccagtcgttggcacaccaagaagctgccccgcaagacccaccgaggcctgcgcaaggtggcctgtattggggcatggcatcctgctcgtgtagccttctctgtggcacgcgctgggcagaaaggctaccatcaccgcactgagatcaacaagaagatttataagattggccagggcta

SEQ ID NO: 159 - DNA, 966 bp, Homo Sapiens
atgagaggatcgcatcaccatcaccatcacggatcctatttaggtgacactatagaatcgtcgacccacgcgtccgccctgttaaaagcctcggaagtggaagagattctggatggcaacgatgagaagtacaaggctgtgtccatcagcacagagccccccacctacctcagggaacagaaggccaagaggaacagccagtgggtacccaccctgcccaacagctcccaccacttagatgccgtgccatgctccacaaccatcaacaggaaccgcatgggccgagacaagaagagaaccttccccctttgctttgatgaccatgacccagctgtgatccatgagaacgcatctcagcccgaggtgctggtccccatccggctggacatggagatcgatgggcagaagctgcgagacgccttcacctggaacatgaatgagaagttgatgacgcctgagatgttttcagaaatcctctgtgacgatctggatttgaacccgctgacgtttgtgccagccatcgcctctgccatcagacagcagatcgagtcctaccccacggacagcatcctggaggaccagtcagaccagcgcgtcatcatcaagctgaacatccatgtgggaaacatttccctggtggaccagtttgagtgggacatgtcagagaaggagaactcaccagagaagtttgccctgaagctgtgctcggagctggggttgggcgggggagtttgtcaccaccatcgcatacagcatccggggacagctgagctggcatcagaagacctacgccttcagcgagaaccctctgcccacagtggagattgccatccggaacacgggcgatgcggaccagtggtgcccactgctggagactctgacagacgctgagatggagaagaagatccgcgaccaggacaggaacacgaggcggatgaggcgtcttgccaacacggccccgggcct

SEQ ID NO: 160 - DNA, 925 bp, Homo Sapiens
atgagaggatcgcatcaccatcaccatcacggatcctatttaggtgacactatagaatcgtcgacccacgcgtccgatcgaccagttcctggtggtggcccgctctgtgggcaccttcgcacgggccctggactgcagcagctccgtccgacagcccagcctgcacatgagcgccgcagctgcctcccgagacatcaccctgttccacgccatggatactctccacaagaacatctacgacatctccaaggccatctcggcgctggtgccgcagggcgggcccgtgctctgcagggacgagatggaggagtggtctgcatcagaggccaaccttttcgaggaagccctggaaaaatatgggaaggatttcacggacattcagcaagattttctcccgtggaagtcgctgaccagcatcattgagtactactacatgtggaagaccaccgacagatacgtgcagcagaaacgcttgaaagcagctgaagctgagagcaagttaaagcaagtttatattcccaactataacaagccaaatccgaaccaaatcagcgtcaacaacatcaaggccggtgtggtgaacggcacgggggcgccgggccagagccctggggctggccgggcctgcgagagctgttacaccacacagtcttaccagtggtattcttggggtccccctaacatgcagtgtcgtctctgcgcatcttgttggacatattggaagaaatatggtggcttgaaaatgccaacccggttagatggagagaggccaggaccaaaccgcagtaacatgagtccccacggcctcccagcccggagcagcgggagccccaagtttgccatgaagaccaggcaggctttctatctgcacacgacgaagctgacgcggatcgcccggcgcctgtgccgtgagatcctgcgcccg

SEQ ID NO: 161 - DNA, 1276 bp, Homo Sapiens
  misc_feature (1257)..(1257): n is a, c, g, or t
taagatattacttgagaggatgcatcaccatcaccatcacggtcgacccacgcgtccgaacccttttaacgagtattccaaatttgatggcaagggtcatgtaggtacaacagcaaccaagaagatcgatgtctacctccctctgcactcgagccaggacagactgctgccaatgaccgtggtgacaatggccagcgccagggtgcaggacctgatcgggctcatctgctggcagtatacaagcgaaggacgggagccgaagctcaatgacaatgtcagtgcctactgcctgcatattgctgaggatgatggggaggtggacaccgatttccccccgctggattccaatgagcccattcataagtttggcttcagtactttggccctggttgaaaagtactcatctcctggtctgacatccaaagagtcactctttgttcgaataaatgctgctcatggattctcccttattcaggtggacaacacaaaggttaccatgaaggaaatcttactgaaggcagtgaagcgaagaaaaggatcccagaaagtttcaggccctcagtaccgcctggagaagcagagcgagcccaatgtcgccgttgacctggacagcactttggagagccagagcgcatgggagttctgcctggtccgcgagaacagttcaagggcagacggggtttttgaggaggattcgcaaattgacatagccacagtacaggatatgcttagcagccatcattacaagtcattcaaagtcagcatgatccacagactgcgattcacaaccgacgtacagctaggtatctctggagacaaagtagagatagaccctgttacgaatcagaaagccagcactaagttttggattaggcaaaacccctctcaatcgattccgacctgctctgtgcctgtgaccttgctgaagagaaaaacccccgtcacccaatatttaaactcccgtatcttaacaatccccactataaacccccctacttttaatccgaccctgctaccgtccaatgaaatggggtccaggttaaatatacccctggaaattccaagttaacactgcccggggctgaaaattttgtttcaaaaaaaaaaaaatttaacagacgactcacccttctcctttcaaaagagaaaaaaataccggccagcagaggaactgggccccccccacccactcgttctctaacttcaaactcttttcccaaggacagtaccccataaaccccccccggccactaaaanctccccgccgaaacacacc

SEQ ID NO: 162 - DNA, 1388 bp, Homo Sapiens
ctaagaatactagagaggatgcatcaccatcaccatcacggtcgaccccgcgtccggcgcggcctcccgggcgggcctacagccatgtcccgggacccggggtcgggcggctgggaggaggccccgcgcgcagctgccgcgctctgcaccctgtaccacgaggccggacagcggctgcgccgcctgcaggaccagctcgctgcccgcgacgccctcatcgctcgcctccgcgcccgcctggccgcgctggagggggacgccgcgccgtccctagtggacgcgctgctggagcaggttgcgcgcttccgggagcagctgcgaaggcaggagggcggcgccgccgaggcccagatgcgccaggaaattgagaggctgactgagcgactagaagaaaaagagagggagatgcagcagctgctgagccagccccaacacgagcgagagaaggaagtcgtcctgctacggaggagcatggcagaaggggagcgcgcccgggccgccagtgacgtcctgtgccgctccttggccaacgagacccatcagctgcggacgatgctgaccgccaacgcccactgagtcagtacccgtcaactgcagcatcaaactcgccatgccacaggcatgtcgactacaaatccccgccaaaacacccacatatacgccacaccgatgcaacattacaaagagaaatcgaccaaacttactactcctaatccaaatcctattcttattaaaaaaaccaacataccttaaacaaatcacccacgccaaacaaaactttcacctactttccgccaacaacaccataatatctcctcccaacacaaataatcagaaagtaattaaaaacaaaacaaattctcaaaaactaacatcataataatccctctaactcccaacatcataaaaatacccacaacctactaacatacacactcccaaaactttccacaacccatatcttccaatcccaacccatactaaaacaataccatttataaacaacaaacacacatatacaacatccaccaccccacacaattatatcaaatcaataaaacaactccaatacttaaaagcatataaaataactaaatacctctatacaacgatcacacccttcaaataaaactcatcaacccacctactataataccccatactcaatacccttattgacaattctcatatcaataatccactctccacaacacaaactccatatcataaacccctattcaatcacatttccatatacctaacctctacactacacatccccccaaccaccataccttctcctcacccaaattaaacctcccccccactacgacgcatatactctaaatcatcccccctccaaccataaccctaccaacaatacaaca

SEQ ID NO: 163 - DNA, 973 bp, Homo Sapiens
atgagaggatcgcatcaccatcaccatcacggatcctatttaggtgacactatagaatcgtcgacccacgcgtccgatttggatgaacaagaatttgtttacaaggagcctgcaataaccaaacttgcagagatatctcacagattggagggattttacggagaaagatttggagaggatgtggttgaagtaatcaaagactctaatcctgtagacaagtgtaaattagatcctaacaaggcatatattcagattacctatgtggagccatactttgacacatatgagatgaaggacagaatcacctatttcgacaaaaattacaatcttcgtcgattcatgtactgtacaccctttactttagatggccgtgcccatggggaacttcatgaacaattcaaaaggaagaccattctgactacgtctcatgcctttccttatattaaaacaagggtcaatgtcactcataaagaagagatcatcttaacaccaattgaagttgctattgaggacatgcagaaaaagacacaggagttggcatttgcaacacatcaggatcccgcagaccccaaaatgcttcagatggtactccagggatctgtaggcaccacagtgaatcaggggcctttggaagttgcccaggtttttctgtctgaaatacctagtgacccaaagctcttcagacatcataataaactgcgactctgctttaaagattttactaaaaggtgtgaagatgccttaagaaaaaataagagcttaattgggccggatcaaaaggagtatcaaagggaactggagagaaactatcatcgccttaaagaggccctacagccactgatcaacagaaagatccctcagttatacaaaggcagtattgcctgtcacctgccacagagattccttcagtcgaatgagccttcgcaaaatggatctctaaactgaatgcacttgttttattcatctgcaaaga

SEQ ID NO: 164 - DNA, 511 bp, Homo Sapiens
gctataatctgctgggttttctgcagcgtagcagcaattttcagtgtcagaaactgctgtggcagctgaatggtcgtctggaatattgtctgaaagatcgcatgaactttgatatcccggaagaaattaaacagctgcagcagtttcagaaagaagatgcagccctgaccatttatgaaatgctgcagaacatttttgccatttttcgtcaggatagcagcagcaccggttggaatgaaaccattgttgaaaatctgctggccaacgtgtatcatcagatcaatcatctgaaaaccgtgctggaagaaaaactggaaaaagaggactttacacgcggtaaactgatgagcagcctgcatctgaaacgttattatggtcgcatcctgcattatctgaaagccaaagaatatagccattgtgcatggaccattgttcgtgttgaaatcctgcgcaacttttattttattaaccgcctgaccggctatctgcgtaattaagcggccgcgagctc

SEQ ID NO: 165 - DNA, 535 bp, Homo Sapiens
gttgtgatctgccgcagaatcatggtctgctgagccgtaataccctggttctgctgcatcagatgcgtcgtattagcccgtttctgtgtctgaaagatcgtcgtgattttcgttttccgcaggaaatggttaaaggtagccagctgcagaaagcacatgttatgagcgttctgcatgaaatgctgcagcagatctttagcctgtttcataccgaacgtagcagcgcagcatggaatatgaccctgctggatcagctgcataccggtctgcatcagcagctgcagcatctggaaacctgtctgctgcaggttgttggtgaaggtgaatctgccggtgcaattagctctccggcactgaccctgcgtcgttattttcagggtatccgcgtgtatctgaaagagaaaaaatatagcgattgtgcctgggaagttgttcgcatggaaatcatgaaaagcctgtttctgagcaccaatatgcaggaacgtctgcgtagcaaagatcgtgatctgggtagcagctaagcggccgcgagctc

SEQ ID NO: 166 - DNA, 562 bp, Homo Sapiens
cgcctggtgaagatagcaaagatgttgcagcaccgcatcgtcagccgctgaccagcagcgaacgtattgataaacaaatccgctatattctggatggtattagcgcactgcgtaaagaaacctgcaataaaagcaatatgtgcgaaagcagcaaagaagcactggccgaaaataatctgaatctgccgaaaatggcagaaaaagatggttgttttcagagcggctttaatgaagaaacctgcctggtgaaaattattaccggtctgctggaatttgaagtgtatctggaatatctgcagaatcgttttgaaagcagcgaagaacaggcacgtgcagttcagatgagcaccaaagttctgattcagttcctgcagaaaaaagcaaaaaacctggatgcaattaccacccctgatccgaccaccaatgcaagcctgctgaccaaactgcaggcacagaatcagtggctgcaggatatgaccacccatctgattctgcgcagctttaaagaatttctgcagagcagcctgcgtgcactgcgtcagatgtaagcggccgcgagctc

SEQ ID NO: 167 - DNA, 493 bp, Homo Sapiens
cgggtcagggcacccagagcgaaaacagctgtacccattttccgggtaatctgccgaatatgctgcgcgatctgcgtgatgcatttagccgtgtgaaaaccttctttcagatgaaagatcagctggataatctgctgctgaaagaaagcctgctggaagattttaaaggttatctgggttgccaggcactgagcgaaatgattcagttttacctggaagaagttatgccgcaggcagaaaatcaggacccggatattaaagcacatgtgaatagcctgggtgaaaatctgaaaaccctgcgtctgcgcctgcgtcgttgtcatcgttttctgccgtgcgaaaacaaaagcaaagccgtggaacaggtgaaaaatgccttcaataaactgcaggaaaaaggcatttataaagccatgagcgagttcgatatcttcatcaactatatcgaagcctatatgaccatgaaaatccgcaactaagcggccgcgagctc

SEQ ID NO: 168 - DNA, 604 bp, Homo Sapiens
atctgccggttgcaacccctgatccgggtatgtttccgtgtctgcatcacagccaaaatctgctgcgtgctgttagcaatatgctgcagaaagcacgtcagaccctggaattttatccgtgtaccagcgaagaaatcgatcatgaggatattaccaaagataaaaccagcaccgttgaagcatgtctgccgctggaactgaccaaaaatgaaagctgtctgaatagccgtgaaaccagctttattaccaatggtagctgtctggccagccgtaaaacctcttttatgatggcactgtgcctgagcagcatttatgaggatctgaaaatgtaccaggtggagtttaaaaccatgaatgccaaactgctgatggacccgaaacgtcagatttttctggatcagaatatgctggcagtgattgatgaactgatgcaggccctgaattttaatagcgaaaccgttccgcagaaaagcagcctggaagaaccggatttctataaaaccaaaattaaactgtgcatcctgctgcatgcatttcgtattcgtgcagttaccattgatcgtgtgatgagctatctgaatgcaagctaagcggccgcgagctc

SEQ ID NO: 169 - DNA, 931 bp, Homo Sapiens
gggaactgaaaaaagatgtgtatgtggtggaactggattggtatccggatgcaccgggtgaaatggttgttctgacctgtgatacaccggaagaagatggtattacctggaccctggatcagagcagcgaagttctgggtagcggtaaaaccctgaccattcaggtgaaagaatttggtgatgcaggtcagtatacctgtcataaaggtggtgaagttctgagccatagcctgctgctgctgcataaaaaagaagatggcatttggagcaccgatatcctgaaagatcagaaagagccgaaaaataaaacctttctgcgctgcgaagcaaaaaattatagcggtcgctttacctgttggtggctgaccaccattagcaccgatctgacctttagcgttaaaagcagccgtggtagcagcgatccgcagggtgttacctgtggtgcagcaaccctgagcgcagaacgtgttcgtggcgataacaaagaatatgaatacagcgtggaatgtcaggaagatagcgcctgtccggcagcagaagaaagcctgccgattgaagttatggttgatgccgtgcacaaactgaaatatgagaactacaccagcagcttttttatccgcgatattattaaaccggaccctccgaaaaatctgcagctgaaaccgctgaaaaacagccgtcaggttgaagttagctgggaatatccggatacctggtctacaccgcatagctattttagcctgaccttttgtgttcaggttcagggtaaaagcaaacgcgaaaaaaaagatcgcgtgttcaccgataaaaccagcgcaaccgtgatttgtcgtaaaaatgccagcattagcgttcgtgcacaggatcgttattatagcagcagctggtctgaatgggcaagcgttccgtgtagctaagcggccgcgagctc

SEQ ID NO: 170 - DNA, 778 bp, Homo Sapiens
ttcatcaggttcgtcgtgttatgaccattctgtttctgaccatggtgattagctattttggttgtatgaaagccgcaccgatgaaagaagcaaatattcgcggtcagggtggtctggcatatccgggtgttcgtacccatggcaccctggaaagcgttaatggtccgaaagcaggtagccgtggtctgaccagcctggcagatacctttgaacatgtgatcgaagaactgctggatgaagatcagaaagttcgtccgaacgaagaaaataacaaagatgccgatctgtataccagccgtgttatgctgagcagccaggttccgctggaaccgcctctgctgtttctgctggaagaatacaaaaattatctggacgcagcaaatatgagcatgcgtgttcgtcgtcatagcgatccggcacgtcgtggtgaactgagcgtttgtgatagcattagcgaatgggttaccgcagcagataaaaaaaccgcagttgatatgagcggtggcaccgttaccgttctggaaaaagttccggttagcaaaggtcagctgaaacagtacttctacgaaaccaaatgcaatccgatgggttataccaaagaaggttgtcgcggtattgataaacgtcattggaatagccagtgtcgtaccacccagagctatgttcgtgcactgaccatggatagcaaaaaacgtattggttggcgctttattcgtattgataccagctgtgtttgtaccctgaccattaaacgtggtcgttaagcggccgcgagctc

SEQ ID NO: 171 - DNA, 613 bp, Homo Sapiens
catttaccgaacattctccgctgacaccgcatcgtcgtgatctgtgtagccgtagcatttggctggcacgtaaaattcgtagcgatctgaccgcactgaccgaaagctatgttaaacatcagggcctgaacaaaaatattaacctggatagcgcagatggtatgccggttgcaagcaccgatcagtggagcgaactgaccgaagcagaacgtctgcaggaaaatctgcaggcatatcgtacctttcatgttctgctggcacgtctgctggaagatcagcaggttcattttaccccgaccgaaggtgattttcatcaggcaattcataccctgctgctgcaggttgcagcatttgcatatcagatcgaggaactgatgatcctgctggaatataaaattccgcgtaatgaagcagatggcatgccgattaatgttggtgatggtggcctgtttgaaaaaaaactgtggggtctgaaagttctgcaagaactgagccagtggaccgttcgtagcattcatgatctgcgctttattagcagccatcagaccggtattccggcacgtggtagccattatattgccaataacaaaaaaatgtaagcggccgcgagctc

SEQ ID NO: 172 - DNA, 250 bp, Homo Sapiens
gtgcagttctgcctcgtagcgcaaaagaactgcgttgtcagtgcatcaaaacctatagcaaaccgtttcatccgaaattcatcaaagaactgcgcgttattgaaagcggtccgcattgtgcaaataccgaaatcatcgtgaaactgtctgatggtcgtgaactgtgtctggacccgaaagaaaattgggttcagcgcgttgtggaaaaatttctgaaacgtgccgaaaacagctaagcggccgcgagctc

SEQ ID NO: 173 - DNA, 1800 bp, Homo Sapiens
atctgacccagcctccgaccattaccaaacagagcgccaaagatcatattgttgatccgcgtgataacattctgattgaatgcgaagcaaaaggtaatccggcaccgagctttcattggacccgtaatagccgctttttcaacattgcaaaagatccgcgtgttagcatgcgtcgtcgtagcggcaccctggttattgattttcgtagcggtggtcgtccggaagaatatgaaggcgaatatcagtgctttgcccgtaataaatttggcaccgcactgagcaatcgtattcgtctgcaggttagcaaatctccgctgtggccgaaagaaaatctggacccggttgttgttcaggaaggtgcaccgctgaccctgcagtgtaatccgcctccgggtctgccgtcaccggttattttttggatgagcagcagcatggaaccgattacccaggataaacgtgttagccagggtcataatggtgatctgtactttagcaatgtgatgctgcaggatatgcagaccgattatagctgtaacgcacgctttcattttacccataccattcagcagaaaaacccgtttaccctgaaagttctgaccaatcatccgtataatgatagcagcctgcgtaatcatccggatatgtatagcgcacgtggtgttgcagaacgtaccccgagctttatgtatccgcagggcaccgcaagcagccagatggttctgcgtggtatggatctgctgctggaatgtattgcaagcggtgttccgacaccggatattgcatggtataaaaaaggtggtgatctgccgagcgataaagccaaatttgaaaatttcaataaagccctgcgtattaccaatgttagcgaagaggatagcggtgaatatttttgcctggccagcaataaaatgggtagcattcgtcataccattagcgttcgtgttaaagcagcaccgtattggctggatgaaccgaaaaatctgattctggcaccgggtgaagatggtcgtctggtttgtcgtgcaaatggtaatccgaaaccgaccgttcagtggatggttaatggtgaaccgctgcagagcgcaccgcctaatccgaatcgtgaagttgccggtgataccattatttttcgcgatacccagattagcagccgtgcagtttatcagtgtaacaccagcaatgaacatggttatctgctggcaaatgcatttgttagcgttctggatgttccgcctcgtatgctgtctccgcgtaatcaactgattcgcgtgattctgtataatcgtacccgtctggattgtccgttttttggtagcccgattccgaccctgcgttggtttaaaaatggtcagggtagcaatctggatggtggcaactatcatgtgtatgaaaacggcagcctggaaattaaaatgatccgcaaagaggatcagggtatttatacctgtgttgccaccaatattctgggtaaagccgaaaatcaggttcgtctggaagttaaagatccgacccgtatttatcgtatgccggaagatcaggttgcacgtcgtggcaccaccgttcagctggaatgtcgtgttaaacatgatccgagcctgaaactgaccgttagctggctgaaagatgatgaaccgctgtatattggcaaccgcatgaaaaaagaagatgacagcctgaccatcttcggtgtggccgaacgtgaccaaggttcatatacctgcgttgcaagcaccgaactggatcaggatctggcaaaagcatatctgaccgttctgggtcgctaagcggccgcttaattaa

SEQ ID NO: 174 - DNA, 638 bp, Homo Sapiens
  misc_feature (8)..(8): n is a, c, g, or t
  misc_feature (51)..(51): n is a, c, g, or t
  misc_feature (73)..(73): n is a, c, g, or t
  misc_feature (638)..(638): n is a, c, g, or t
tcggaatntaaaaaattatttgctttgtgagcggatacatttaatagattnattgtgagcggataacaatttncacagaattattaaagaggagaaattaactatgagaggatcgcatcaccatcaccatcacggatcctatttaggtgacactatagaatcgtcgacccacgcgtccgcggaggcgttcagctgcttcaagatgaagctgaacatctccttcccagccactggctgccagaaactcattgaagtggacgatgaacgcaaacttcgtactttctatgagaagcgtatggccacagaagttgctgctgacgctctgggtgaagaatggaagggttatgtggtccgaatcagtggtgggaacgacaaacaaggtttccccatgaagcagggtgtcttgacccatggccgtgtccgcctgctactgagtaaggggcattcctgttacagaccaaggagaactggagaaagaaagagaaaatcagttcgtggttgcattgtggatgcaaatctgagcgttctcaacttggttattgtaaaaaaaggagagaaggatattcctggactgactgatactacagtgcctcgccgcctgggccccaaaagagctagcagaatccgcaaacttttcn

SEQ ID NO: 175 - DNA, 1303 bp, Homo Sapiens
  misc_feature (3)..(3): n is a, c, g, or t
  misc_feature (582)..(582): n is a, c, g, or t
  misc_feature (670)..(670): n is a, c, g, or t
  misc_feature (703)..(703): n is a, c, g, or t
  misc_feature (721)..(721): n is a, c, g, or t
  misc_feature (739)..(739): n is a, c, g, or t
  misc_feature (749)..(750): n is a, c, g, or t
  misc_feature (779)..(779): n is a, c, g, or t
  misc_feature (783)..(783): n is a, c, g, or t
  misc_feature (794)..(794): n is a, c, g, or t
  misc_feature (813)..(813): n is a, c, g, or t
  misc_feature (817)..(817): n is a, c, g, or t
  misc_feature (824)..(824): n is a, c, g, or t
  misc_feature (829)..(829): n is a, c, g, or t
  misc_feature (832)..(832): n is a, c, g, or t
  misc_feature (834)..(834): n is a, c, g, or t
  misc_feature (840)..(840): n is a, c, g, or t
  misc_feature (842)..(842): n is a, c, g, or t
  misc_feature (847)..(847): n is a, c, g, or t
  misc_feature (856)..(857): n is a, c, g, or t
  misc_feature (863)..(863): n is a, c, g, or t
  misc_feature (871)..(872): n is a, c, g, or t
  misc_feature (876)..(876): n is a, c, g, or t
  misc_feature (880)..(880): n is a, c, g, or t
  misc_feature (884)..(884): n is a, c, g, or t
  misc_feature (894)..(894): n is a, c, g, or t
  misc_feature (898)..(898): n is a, c, g, or t
  misc_feature (901)..(901): n is a, c, g, or t
  misc_feature (904)..(904): n is a, c, g, or t
  misc_feature (907)..(907): n is a, c, g, or t
  misc_feature (909)..(909): n is a, c, g, or t
  misc_feature (913)..(913): n is a, c, g, or t
  misc_feature (918)..(918): n is a, c, g, or t
  misc_feature (924)..(924): n is a, c, g, or t
  misc_feature (926)..(927): n is a, c, g, or t
  misc_feature (934)..(934): n is a, c, g, or t
  misc_feature (936)..(936): n is a, c, g, or t
  misc_feature (942)..(942): n is a, c, g, or t
  misc_feature (948)..(952): n is a, c, g, or t
  misc_feature (957)..(958): n is a, c, g, or t
  misc_feature (971)..(971): n is a, c, g, or t
  misc_feature (973)..(974): n is a, c, g, or t
  misc_feature (981)..(981): n is a, c, g, or t
  misc_feature (997)..(997): n is a, c, g, or t
  misc_feature (1002)..(1003): n is a, c, g, or t
  misc_feature (1011)..(1013): n is a, c, g, or t
  misc_feature (1015)..(1015): n is a, c, g, or t
  misc_feature (1017)..(1018): n is a, c, g, or t
  misc_feature (1020)..(1021): n is a, c, g, or t
  misc_feature (1024)..(1024): n is a, c, g, or t
  misc_feature (1029)..(1031): n is a, c, g, or t
  misc_feature (1037)..(1041): n is a, c, g, or t
  misc_feature (1051)..(1051): n is a, c, g, or t
  misc_feature (1053)..(1053): n is a, c, g, or t
  misc_feature (1057)..(1057): n is a, c, g, or t
  misc_feature (1060)..(1062): n is a, c, g, or t
  misc_feature (1067)..(1067): n is a, c, g, or t
  misc_feature (1070)..(1071): n is a, c, g, or t
  misc_feature (1074)..(1074): n is a, c, g, or t
  misc_feature (1077)..(1077): n is a, c, g, or t
  misc_feature (1079)..(1081): n is a, c, g, or t
  misc_feature (1086)..(1086): n is a, c, g, or t
  misc_feature (1088)..(1090): n is a, c, g, or t
  misc_feature (1092)..(1092): n is a, c, g, or t
  misc_feature (1095)..(1095): n is a, c, g, or t
  misc_feature (1099)..(1099): n is a, c, g, or t
  misc_feature (1101)..(1101): n is a, c, g, or t
  misc_feature (1104)..(1104): n is a, c, g, or t
  misc_feature (1109)..(1109): n is a, c, g, or t
  misc_feature (1113)..(1113): n is a, c, g, or t
  misc_feature (1117)..(1117): n is a, c, g, or t
  misc_feature (1119)..(1120): n is a, c, g, or t
  misc_feature (1126)..(1126): n is a, c, g, or t
  misc_feature (1129)..(1131): n is a, c, g, or t
  misc_feature (1135)..(1135): n is a, c, g, or t
  misc_feature (1140)..(1140): n is a, c, g, or t
  misc_feature (1142)..(1142): n is a, c, g, or t
  misc_feature (1147)..(1155): n is a, c, g, or t
  misc_feature (1157)..(1157): n is a, c, g, or t
  misc_feature (1164)..(1165): n is a, c, g, or t
  misc_feature (1173)..(1173): n is a, c, g, or t
  misc_feature (1176)..(1176): n is a, c, g, or t
  misc_feature (1179)..(1179): n is a, c, g, or t
  misc_feature (1182)..(1182): n is a, c, g, or t
  misc_feature (1186)..(1186): n is a, c, g, or t
  misc_feature (1188)..(1192): n is a, c, g, or t
  misc_feature (1194)..(1194): n is a, c, g, or t
  misc_feature (1197)..(1197): n is a, c, g, or t
  misc_feature (1200)..(1200): n is a, c, g, or t
  misc_feature (1204)..(1204): n is a, c, g, or t
  misc_feature (1207)..(1209): n is a, c, g, or t
  misc_feature (1211)..(1211): n is a, c, g, or t
  misc_feature (1215)..(1215): n is a, c, g, or t
  misc_feature (1218)..(1229): n is a, c, g, or t
  misc_feature (1234)..(1234): n is a, c, g, or t
  misc_feature (1239)..(1239): n is a, c, g, or t
  misc_feature (1241)..(1244): n is a, c, g, or t
  misc_feature (1246)..(1247): n is a, c, g, or t
  misc_feature (1249)..(1251): n is a, c, g, or t
  misc_feature (1253)..(1253): n is a, c, g, or t
  misc_feature (1255)..(1259): n is a, c, g, or t
  misc_feature (1261)..(1261): n is a, c, g, or t
  misc_feature (1263)..(1265): n is a, c, g, or t
  misc_feature (1268)..(1268): n is a, c, g, or t
  misc_feature (1273)..(1273): n is a, c, g, or t
  misc_feature (1276)..(1276): n is a, c, g, or t
  misc_feature (1280)..(1280): n is a, c, g, or t
  misc_feature (1282)..(1283): n is a, c, g, or t
  misc_feature (1285)..(1287): n is a, c, g, or t
  misc_feature (1290)..(1291): n is a, c, g, or t
  misc_feature (1293)..(1297): n is a, c, g, or t
atntagagaaattactatgagaggatcgcatcaccatcaccatcacggatcctatttaggtgacactatagaatcgtcgacccacgcgtccggcgcggcggctgctggagccgggggcggcggagccagccgagcgcggcgcggagccggaggcgggcgcggagccggcgggggccgaggtggctgggcccggggccgcagcggcgggggcagtcggggctccggtgcccgtggattgctcggacgaggcgggcaacaccgcactgcagttcgccgcggccgggggccacgaaccgctggtgcgcttcctgctgcgccgcggtgcctcggtcaacagccgcaaccactacggctggagcgcgctcatgcaggcggccagatgaggagaaaaggcgacctgatattttccatgcattgaaaatgggaaacttccagctggtcaaagagattgccgatgaagaccccagccacgtgaacttggtcaatggggacggggcgacgccactgatgctagcagctgttacggggcagctggctctggtgcagctgctggtggagaggcacgcggatgttgacaagcangacagcgtgcatggctggacggccctcatgcaggcaacctaccatggacacggaacttgttcgactgctggcatctgtctgcatgcangtgaataaagacaaaggccggccgagccaccancctcccctgccccactcnaaggtccgacagccctgnagcatcccanntgctgcccgatgacaagggtggaatgaanttcntggtggaaccnaatgtccaaatcggttccnaaanctcaaantgatncananctgccncntgggnttgtccaannaaccanccttttgnntttntttnaacnaaccctaaanccanctnttngantncaanaaatnaaaggntnnccccccnanaaaaanaaaaannnnnttctnnaattccttaaatngnnccccttntgaaccaaaaaaaaanggttnnttgggtannntnannannaanaaaannnaaaaannnnntttttttaanantccnttnnnaaaanttnnaanaanannnaaaangnnntnccntttngnaantttanattncctntnnaaaaanaannntttntaaancntaaannnnnnnnncncctttannaaaaaggnaanaanttnaaanannnnnanttnttntttnttnnntntccnatnnnnnnnnnnnnaaaanattgngnnnntnntnnntntnnnnncntnnnaanaaaanaantaantnntnnnaanntnnnnntaaaat

SEQ ID NO: 176 - DNA, 1200 bp, Homo Sapiens
  misc_feature (297)..(297): n is a, c, g, or t
  misc_feature (561)..(561): n is a, c, g, or t
  misc_feature (785)..(785): n is a, c, g, or t
  misc_feature (841)..(841): n is a, c, g, or t
  misc_feature (851)..(851): n is a, c, g, or t
  misc_feature (875)..(875): n is a, c, g, or t
  misc_feature (922)..(922): n is a, c, g, or t
  misc_feature (941)..(941): n is a, c, g, or t
  misc_feature (951)..(951): n is a, c, g, or t
  misc_feature (965)..(965): n is a, c, g, or t
  misc_feature (979)..(979): n is a, c, g, or t
  misc_feature (998)..(998): n is a, c, g, or t
  misc_feature (1015)..(1015): n is a, c, g, or t
  misc_feature (1024)..(1024): n is a, c, g, or t
  misc_feature (1026)..(1026): n is a, c, g, or t
  misc_feature (1064)..(1064): n is a, c, g, or t
  misc_feature (1080)..(1080): n is a, c, g, or t
  misc_feature (1111)..(1111): n is a, c, g, or t
  misc_feature (1115)..(1115): n is a, c, g, or t
  misc_feature (1124)..(1124): n is a, c, g, or t
  misc_feature (1131)..(1131): n is a, c, g, or t
  misc_feature (1144)..(1144): n is a, c, g, or t
  misc_feature (1150)..(1151): n is a, c, g, or t
  misc_feature (1157)..(1157): n is a, c, g, or t
  misc_feature (1159)..(1159): n is a, c, g, or t
  misc_feature (1165)..(1165): n is a, c, g, or t
  misc_feature (1167)..(1167): n is a, c, g, or t
  misc_feature (1170)..(1170): n is a, c, g, or t
  misc_feature (1180)..(1180): n is a, c, g, or t
  misc_feature (1184)..(1184): n is a, c, g, or t
tagagagattactatgagaggatcgcatcaccatcaccatcacggatcctatttaggtgacactatagaatcgtcgacccacgcgtccgcgggactcttggcgggtgaaggtgtgtgtcagcttttgcgtcactcgagccctgggcgctgcttgctaaagagccgagcacgcgggtctgtcatcatgtcgcgttacgggcggtacggaggagaaaccaaggtgtatgttggtaacctgggaactggcgctggcaaaggagagttagaaagggctttcagttattatggtcctttaanaactgtatggattgcgagaaatcctccaggatttgcctttgtggaattcgaagatcctagagatgcagaagatgcagtacgaggactggatggaaaggtgatttgtggctcccgagtgagggttgaactatcgacaggcatgcctcggagatcacgttttgatagaccacctgcccgacgtccctttgatccaaatgatagatgctatgagtgtggcgaaaagggacattatgcttatgattgtcatcgttacagccggcgaanaagaagcaggtatttattttaataaaggaatggttggtattctagttaatcaagtaattcttttattagcaaggcagaaactagtgtttttctataaacttgaatgttaattgtacaggtgtattttacaatttttgtttaattaaaaaaatgttactatattaataatcaacctggtcaaaacctttcaggtttcttcgtttgagtcagtcgccttgattcanaatgtcacgagccttatgatatcatgctgaggcgccttgcaaatccgacaattaanatcctcctanaccttgaggtgatcagcataaaangccaaatcccctcgagtcatctacacctagcttcaccttattctttnaaagggcaaaaaatttganacggtgatcnccgtaacagtaaantttggcttacaatnggggccccccctccggttnaaaaaaaagaaccccanaattgaccncntttcccactaaaaaatcttcttgcgtcaatcaagcccnccctggctcatttggntgtcatttgatccccccttaaattgaaaaancctnctaatgccncgatcgnctaaaaaacctcnaaatcnncaaatncncaaacnanggnccaaaaaggncacngcaactgcaaggttat

SEQ ID NO: 177 - DNA, 651 bp, Homo Sapiens
  misc_feature (32)..(32): n is a, c, g, or t
  misc_feature (34)..(34): n is a, c, g, or t
  misc_feature (37)..(37): n is a, c, g, or t
  misc_feature (40)..(40): n is a, c, g, or t
gaatataaaaattatttgctttgtgagcggananatntangattaattgtgagcggataacaatttacacagaattattaaagaggagaaattaactatgagaggatcgcatcaccatcaccatcacggatcctatttaggtgacactatagaatcgtcgacccacgcgtccgctcgagggaccctggaggagatgccaaccgttcaacatcctttcctcaatgtcttcgagttggagcggctcctctacacaggcaagacagcctgtaaccatgccgacgaggtctggccaggcctctatctcggagaccaggacatggctaacaaccgccgggagcttcgccgcctgggcatcacgcacgtcctcaatgcctcacacagccggtggcgaggcacgcccgaggcctatgaggggctgggcatccgctacctgggtgttgaggcccacgactcgccagcctttgacatgagcatccacttccagacggctgccgacttcatccaccgggcgctgagccagccaggagggaagatcctggtgcattgtgctgtgggcgtgagccgatccgccaccctggtactggcctacctcatgctgtaccaccaccttacccttcgtggaggccatcaagaaagtcaaagaccaccgag

SEQ ID NO: 178 - DNA, 1198 bp, Homo Sapiens
  misc_feature (1)..(1): n is a, c, g, or t
  misc_feature (936)..(936): n is a, c, g, or t
  misc_feature (974)..(974): n is a, c, g, or t
  misc_feature (976)..(976): n is a, c, g, or t
  misc_feature (1009)..(1009): n is a, c, g, or t
  misc_feature (1012)..(1012): n is a, c, g, or t
  misc_feature (1016)..(1018): n is a, c, g, or t
  misc_feature (1020)..(1031): n is a, c, g, or t
  misc_feature (1033)..(1040): n is a, c, g, or t
  misc_feature (1043)..(1045): n is a, c, g, or t
  misc_feature (1047)..(1050): n is a, c, g, or t
  misc_feature (1059)..(1059): n is a, c, g, or t
  misc_feature (1076)..(1076): n is a, c, g, or t
  misc_feature (1086)..(1086): n is a, c, g, or t
  misc_feature (1104)..(1104): n is a, c, g, or t
  misc_feature (1107)..(1107): n is a, c, g, or t
  misc_feature (1110)..(1110): n is a, c, g, or t
  misc_feature (1124)..(1124): n is a, c, g, or t
  misc_feature (1131)..(1132): n is a, c, g, or t
  misc_feature (1143)..(1143): n is a, c, g, or t
  misc_feature (1151)..(1151): n is a, c, g, or t
  misc_feature (1184)..(1184): n is a, c, g, or t
  misc_feature (1186)..(1186): n is a, c, g, or t
  misc_feature (1195)..(1195): n is a, c, g, or t
naattagagaaattaactatgagaggatcgcatcaccatcaccatcacggatcctatttaggtgacactatagaatcgtcgacccacgcgtccgcccacgcgtccgctaagatggaagcgtttttggggtcgcggtccggactttgggcggggggtccggccccaggacagttttaccgcattccatccactcccgattccttcatggatccggcgtctgcactttacagaggtccaatcacgcggacccagaaccccatggtgaccgggacctcagtcctcggcgttaagttcgagggcggagtggtgattgccgcagacatgctgggatcctacggctccttggctcgtttccgcaacatctctcgcattatgcgagtcaacaacagtaccatgctgggtgcctctggcgactacgctgatttccagtatttgaagcaagttctcggccagatggtgattgatgaggagcttctgggagatggacacagctatagtcctagagctattcattcatggctgaccagggccatgtacagccggcgctcgaagatgaaccctttgtggaacaccatggtcatcggaggctatgctgatggagagagcttcctcggttatgtggacatgcttggtgtagcctatgaagccccttcgctggccactggttatggtgcatacttggctcagcctctgctgcgagaagttctggagaagcagccagtgctaagccagaccgaggcccgcgacttagtagaacgctgcatgcgagtgctgtactaccgagatgcccgttcttacaaccggtttcaaatcgccactgtcaccgaaaaaggtgttgaaatagagggaccattgtctacagagaccaactgggatattgcccacatgatcagtggctttgaatgaaatacagatgcattatccagaactgaagtngccctacttttaactttgaacttggctagttcaaagananactcttccttttgtaaagtaaataaattcttcnaantggnnnannnnnnnnnnnnannnnnnnnaannnannnnggggggggnccctccctaaagggagncgaataaacnttaattaactgaactggnacnccngttgaaaaatccanaaagacnncaaaacccctntggatttnttcaaaacccccggttgcccccggggttttttntnggggaaaancca

SEQ ID NO: 179 - DNA, 1234 bp, Homo Sapiens
  misc_feature (930)..(930): n is a, c, g, or t
  misc_feature (932)..(932): n is a, c, g, or t
  misc_feature (946)..(946): n is a, c, g, or t
  misc_feature (972)..(972): n is a, c, g, or t
  misc_feature (979)..(979): n is a, c, g, or t
  misc_feature (985)..(985): n is a, c, g, or t
  misc_feature (1014)..(1014): n is a, c, g, or t
  misc_feature (1021)..(1033): n is a, c, g, or t
  misc_feature (1035)..(1036): n is a, c, g, or t
  misc_feature (1038)..(1052): n is a, c, g, or t
  misc_feature (1054)..(1055): n is a, c, g, or t
  misc_feature (1057)..(1067): n is a, c, g, or t
  misc_feature (1070)..(1072): n is a, c, g, or t
  misc_feature (1074)..(1074): n is a, c, g, or t
  misc_feature (1076)..(1103): n is a, c, g, or t
  misc_feature (1105)..(1108): n is a, c, g, or t
  misc_feature (1110)..(1115): n is a, c, g, or t
  misc_feature (1117)..(1123): n is a, c, g, or t
  misc_feature (1133)..(1133): n is a, c, g, or t
  misc_feature (1139)..(1141): n is a, c, g, or t
  misc_feature (1152)..(1152): n is a, c, g, or t
  misc_feature (1158)..(1160): n is a, c, g, or t
  misc_feature (1162)..(1162): n is a, c, g, or t
  misc_feature (1164)..(1164): n is a, c, g, or t
  misc_feature (1166)..(1166): n is a, c, g, or t
  misc_feature (1169)..(1169): n is a, c, g, or t
  misc_feature (1174)..(1174): n is a, c, g, or t
  misc_feature (1177)..(1177): n is a, c, g, or t
  misc_feature (1187)..(1187): n is a, c, g, or t
  misc_feature (1196)..(1196): n is a, c, g, or t
  misc_feature (1203)..(1203): n is a, c, g, or t
  misc_feature (1213)..(1213): n is a, c, g, or t
  misc_feature (1223)..(1223): n is a, c, g, or t
  misc_feature (1225)..(1225): n is a, c, g, or t
  misc_feature (1234)..(1234): n is a, c, g, or t
tagagaaattactatgagaggatcgcatcaccatcaccatcacggatcctatttaggtgacactatagaatcgtcgacccacgcgtccgaccaaatggcggatgacgccggtgcagcgggggggcccgggggccctggtggccctgggatggggaaccgcggtggcttccgcggaggtttcggcagtggcatccggggccggggtcgcggccgtggacggggccggggccgaggccgcggagctcgcggaggcaaggccgaggataaggagtggatgcccgtcaccaagttgggccgcttggtcaaggacatgaagatcaagtccctggaggagatctatctcttctccctgcccattaaggaatcagagatcattgatttcttcctgggggcctctctcaaggatgaggttttgaagattatgccagtgcagaagcagacccgtgccggccagcgcaccaggttcaaggcatttgttgctatcggggactacaatggccacgtcggtctgggtgttaagtgctccaaggaggtggccaccgccatccgtggggccatcatcctggccaagctctccatcgtccccgtgcgcagaggctactgggggaacaagatcggcaagccccacactgtcccttgcaaggtgacaggccgctgcggctctgtgctggtacgcctcatccctgcacccaggggcactggcatcgtctccgcacctgtgcctaagaagctgctcatgatggctggtatcgatgactgctacacctcagcccggggctgcactgccaccctgggcaacttcgccaaggccacctttgatgccatttctaagacctacagctacctgacccccgacctctggaaggagactgtattcaccaagtctccctatcaggagttcactgaccacctcgtcaagacccacaccanantctccgtgcagcgnactcaggctccagctgtggctacaanatagggntttttntacaaaaaaataaagtgaattaagcgtgnaaaaaannnnnnnnnnnnnannannnnnnnnnnnnnnnannannnnnnnnnnnaannnanannnnnnnnnnnnnnnnnnnnnnnnnnnnannnnannnnnnannnnnnnaggggggccncccccnnnggggccaaaancctttnnnanancntgnccccngtntaaaaccccnaaaaccccnacccccntgtttttttnaaaccttttncncccggtttn

SEQ ID NO: 180 - DNA, 1213 bp, Homo Sapiens
  misc_feature (943)..(943): n is a, c, g, or t
  misc_feature (952)..(952): n is a, c, g, or t
  misc_feature (969)..(969): n is a, c, g, or t
  misc_feature (974)..(974): n is a, c, g, or t
  misc_feature (979)..(979): n is a, c, g, or t
  misc_feature (1006)..(1007): n is a, c, g, or t
  misc_feature (1018)..(1020): n is a, c, g, or t
  misc_feature (1024)..(1024): n is a, c, g, or t
  misc_feature (1030)..(1030): n is a, c, g, or t
  misc_feature (1033)..(1033): n is a, c, g, or t
  misc_feature (1043)..(1043): n is a, c, g, or t
  misc_feature (1058)..(1058): n is a, c, g, or t
  misc_feature (1063)..(1063): n is a, c, g, or t
  misc_feature (1076)..(1076): n is a, c, g, or t
  misc_feature (1078)..(1080): n is a, c, g, or t
  misc_feature (1083)..(1084): n is a, c, g, or t
  misc_feature (1090)..(1091): n is a, c, g, or t
  misc_feature (1094)..(1094): n is a, c, g, or t
  misc_feature (1096)..(1096): n is a, c, g, or t
  misc_feature (1105)..(1105): n is a, c, g, or t
  misc_feature (1109)..(1109): n is a, c, g, or t
  misc_feature (1115)..(1115): n is a, c, g, or t
  misc_feature (1125)..(1125): n is a, c, g, or t
  misc_feature (1132)..(1132): n is a, c, g, or t
  misc_feature (1134)..(1134): n is a, c, g, or t
  misc_feature (1140)..(1140): n is a, c, g, or t
  misc_feature (1142)..(1142): n is a, c, g, or t
  misc_feature (1146)..(1146): n is a, c, g, or t
  misc_feature (1156)..(1156): n is a, c, g, or t
  misc_feature (1167)..(1167): n is a, c, g, or t
  misc_feature (1171)..(1171): n is a, c, g, or t
  misc_feature (1174)..(1174): n is a, c, g, or t
  misc_feature (1180)..(1180): n is a, c, g, or t
  misc_feature (1183)..(1183): n is a, c, g, or t
  misc_feature (1185)..(1185): n is a, c, g, or t
  misc_feature (1190)..(1190): n is a, c, g, or t
  misc_feature (1193)..(1194): n is a, c, g, or t
  misc_feature (1201)..(1201): n is a, c, g, or t
  misc_feature (1207)..(1207): n is a, c, g, or t
tagagaaaattactatgagaggatcgcatcaccatcaccatcacggatcctatttaggtgacactatagaatcgtcgacccacgcgtccgcagggatttgtatatgtttttatcaaccaagagaaagaggtcaactaagatatgtggaacaaaaagcaggaattacttttaaacgtgtaggtgttccttctacaatggatttagttaaatctaaaagcatggatgccatcaggtctctggcttccgtttcttatgctgctgttgattttttccgaccatcagctcagagactgatagaagagaaaggtgcagtggatgcattggctgcagctttagcccacatttctggtgcatcaagttttgaaccacgatctttgatcacctctgataaggggtttgtgaccatgactctggaaagcctagaggaaatacaggatgtcagctgtgcttggaaagaacttaacagaaagctgagtagtaatgcagtgtctcagattaccagaatgtgcctcctgaaagggaatatgggtgtttgctttgatgttcctacaactgagtcagaaaggttacaggcagagtggcatgattccgactggatactctcagtgccagccaaattacctgaaattgaagaatattatgatggaaacacatcttctaattccagacagaggagtggctggtcaagtggtcgatcaggccggtcaggccggtcaggtggtcgatctggcggccggtcaggtagacagagtcgacaaggaagtcgctcaggaagtcgacaagatggtagaagacgaagtgggaatagaaatcgatcaagaagtgggggccacaaacggagttttgactgagtattttgatagttaatctaccagtgtgagcttgcctatttctgcctaatcatgtaccattatccaccaaaaattaggtcatcatagttgangtatgggtncggctatttgcaaaaanttggncgtanttttttttaaaaagtatttcccaaaannggaacaattcnnncttntcccgnttnacctttgaanaaaaaacctcctttnatggncctttaaaaaaanannnaannaaaaannaananaaaaagggngccncccccnaaagggggcnaataacntnattacngnactngaaccccggngaaaaacccgnaagnccnccaacnccncnggttnttnnaaacccnggtggnccgggg

SEQ ID NO: 181 - DNA, 923 bp, Homo Sapiens
tgagaggtcgcatcaccatcaccatcacggtcgacccacgcgtccgcccacgcgtccgcccacgcgtccgcccacgcgtccgcgtggacagaggaagggcgccgggtctgtgttccgcgcgcacgtgaagcaccgtaaaggcgctgcgcgcctgcgcgccgtggatttcgctgagcggcacggctacatcaagggcatcgtcaaggacatcatccacgacccgggccgcggcgcgcccctcgccaaggtggtcttccgggatccgtatcggtttaagaagcggacggagctgttcattgccgccgagggcattcacacgggccagtttgtgtattgcggcaagaaggcccagctcaacattggcaatgtgctccctgtgggcaccatgcctgagggtacaatcgtgtgctgcctggaggagaagcctggagaccgtggcaagctggcccgggcatcagggaactatgccaccgttatctcccacaaccctgagaccaagaagacccgtgtgaagctgccctccggctccaagaaggttatctcctcagccaacagagctgtggttggtgtggtggctggaggtggccgaattgacaaacccatcttgaaggctggccgggcgtaccacaaatataaggcaaagaggaactgctggccacgagtacggggtgtggccatgaatcctgtggagcatccttttggaggtggcaaccaccagcacatcggcaagccctccaccatccgcagagatgcccctgctggccgcaaagtgggtctcattgctgcccgccggactggacgtccccggggaaccaagactgtgcaggagaaagagaactagtgctgagggcctcaataaagtttgtgtttatgccaaaaaaaaaaaaaaaagggcggccgcgatccgcatgcgagctcgatta

SEQ ID NO: 182 - DNA, 1235 bp, Homo Sapiens
ctaaatttaaggaggagaattaactatgagaggatcgcatcaccatcaccatcacggatcctatttaggtgacactatagaatcgtcgacccacgcgtccgcgccgagccagcgcctgggcctggaaccgggccgtagcccccccagtttcgcccaccacctccctaccatggacccccgcaaagtgaacgagcttcgggcctttgtgaaaatgtgtaagcaggatccgagcgttctgcacaccgaggaaatgcgcttcctgagggagtgggtggagagcatgggtggtaaagtaccacctgctactcagaaagctaaatcagaagaaaataccaaggaagaaaaacctgatagtaagaaggtggaggaagacttaaaggcagacgaaccatcaagtgaggaaagtgatctagaaattgataaagaaggtgtgattgaaccagacactgatgctcctcaagaaatgggagatgaaaatgcggagataacggaggagatgatggatcaggcaaatgataaaaaagtggctgctattgaagccctaaatgatggtgaactccagaaagccattgacttattcacagatgccatcaagctgaatcctcgcttggccattttgtatgccaagagggccagtgtcttcgtcaaattacagaagccaaatgctgccatccgagactgtgacagagccattgaaataaatcctgattcagctcagccttacaagtggcgggggaaagcacacagacttctaggccactgggaagaagcagcccatgatcttgcccttgcctgtaaattggattatgatgaagatgctagtgcaatgctgaaagaagttcaacctagggcacagaaaattgcagaacatcggagaaagtatgagcgaaaacgtgaagagcgagagatcaaagaaagaatagaacgagttaagaaggctcgagaagagcatgagagagctcagagggaggaagagccagacgacagtcaggagctcagtatggctcttttccaggtgctttcctgggggatgcctggtattttcccggagaatacctggaatgggagggggcatgcctggatggctggatgcctggacctcatgaaattcttagtgatcagaggtctgcagccatgcaggatccagaggttatgtgcttccagatgtggcctcaatccagccaatatgttcaaataccgagagcactcgaggtatgatctccatcagtaaatgc

SEQ ID NO: 183 - DNA, 929 bp, Homo Sapiens
tgagaggatcgcatcaccatcaccatcacggatcctatttaggtgacactatagaatcgtcgacccaccgtccgggcgtgatgtctcacagaaagttctccgctcccagacatgggtccctcggcttcctgcctcggaagcgcagcagcaggcatcgtgggaaggtgaagagcttccctaaggatgacccatccaagccggtccacctcacagccttcctgggatacaaggctggcatgactcacatcgtgcgggaagtcgacaggccgggatccaaggtgaacaagaaggaggtggtggaggctgtgaccattgtagagacaccacccatggtggttgtgggcattgtgggctacgtggaaacccctcgaggcctccggaccttcaagactgtctttgctgagcacatcagtgatgaatgcaagaggcgtttctataagaattggcataaatctaagaagaaggcctttaccaagtactgcaagaaatggcaggatgaggatggcaagaagcagctggagaaggacttcagcagcatgaagaagtactgccaagtcatccgtgtcattgcccacacccagatgcgcctgcttcctctgcgccagaagaaggcccacctgatggagatccaggtgaacggaggcactgtggccgagaagctggactgggcccgcgagaggcttgagcagcaggtacctgtgaaccaagtgtttgggcaggatgagatgatcgacgtcatcggggtgaccaagggcaaaggctacaaaggggtcaccagtcgttggcacaccaagaagctgccccgcaagacccaccgaggcctgcgcaaggtggcctgtattggggcatggcatcctgctcgtgtagcccttctctgtggcacgcgctgggcagaaaggctaccatcaccgcactgagatcaacaagaa

SEQ ID NO: 184 - DNA, 1214 bp, Homo Sapiens
  misc_feature (882)..(882): n is a, c, g, or t
  misc_feature (913)..(913): n is a, c, g, or t
  misc_feature (915)..(915): n is a, c, g, or t
  misc_feature (950)..(950): n is a, c, g, or t
  misc_feature (956)..(956): n is a, c, g, or t
  misc_feature (1017)..(1017): n is a, c, g, or t
  misc_feature (1027)..(1027): n is a, c, g, or t
  misc_feature (1049)..(1049): n is a, c, g, or t
  misc_feature (1070)..(1070): n is a, c, g, or t
  misc_feature (1073)..(1073): n is a, c, g, or t
  misc_feature (1090)..(1090): n is a, c, g, or t
  misc_feature (1096)..(1097): n is a, c, g, or t
  misc_feature (1101)..(1102): n is a, c, g, or t
  misc_feature (1125)..(1125): n is a, c, g, or t
  misc_feature (1135)..(1135): n is a, c, g, or t
  misc_feature (1141)..(1141): n is a, c, g, or t
  misc_feature (1148)..(1148): n is a, c, g, or t
  misc_feature (1153)..(1154): n is a, c, g, or t
  misc_feature (1158)..(1158): n is a, c, g, or t
  misc_feature (1174)..(1174): n is a, c, g, or t
  misc_feature (1187)..(1187): n is a, c, g, or t
  misc_feature (1190)..(1190): n is a, c, g, or t
  misc_feature (1212)..(1213): n is a, c, g, or t
taattagagaaattactatgagaggatcgcatcaccatcaccatcacggatcctatttaggtgacactatagaatcgtcgacccacgcgtccggccagcgccgagcgatgggcatctctcgggacaactggcacaagcgccgcaaaaccgggggcaagagaaagccctaccacaagaagcggaagtatgagttggggcgcccagctgccaacaccaagattggcccccgccgcatccacacagtccgtgtgcggggaggtaacaagaaataccgtgccctgaggttggacgtggggaatttctcctggggctcagagtgttgtactcgtaaaacaaggatcatcgatgttgtctacaatgcatctaataacgagctggttcgtaccaagaccctggtgaagaattgcatcgtgctcatcgacagcacaccgtaccgacagtggtacgagtcccactatgcgctgcccctgggccgcaagaagggagccaagctgactcctgaggaagaagagattttaaacaaaaaacgatctaaaaaaattcagaagaaatatgatgaaaggaaaaagaatgccaaaatcagcagtctcctggaggagcagttccagcagggcaagcttcttgcgtgcatcgcttcaaggccgggacagtgtggccgagcagatggctatgtgctagagggcaaagagttggagttctatcttaggaaaatcaaggcccgcaaaggcaaataaatccttgttttgtcttcacccatgtaataaaggtgtttattgttttgttcccacaaaaaaaaaaaaaaaaaagggcggccgctccctatagtgagtcgtattaagcttaattagctgagcttggactccctgttgatagatccagtantgacctcagaactccatctggatttgttcanancgctcggttgccgccgggcgttttttattggtganaatccnagctagcttggcgagattttcaggagctaaggaagcttaaattggaaaaaaaaaatccctnggatataccnccgttgaattttcccatgggcntcgtaaaaaaattttgaggcnttncagtcagttgctcatgnaccttnnaccnnaccgttcacctggatttacggcnttttaaaacngtaaanaaaatancccanntttntcggcctttttccatnttgcccctaaaangcnttccgaattcttggaatgaaanng

SEQ ID NO: 185 - DNA, 1393 bp, Homo Sapiens
  misc_feature (4)..(4): n is a, c, g, or t
  misc_feature (10)..(10): n is a, c, g, or t
  misc_feature (567)..(567): n is a, c, g, or t
  misc_feature (582)..(582): n is a, c, g, or t
  misc_feature (652)..(652): n is a, c, g, or t
  misc_feature (768)..(768): n is a, c, g, or t
  misc_feature (796)..(796): n is a, c, g, or t
  misc_feature (802)..(802): n is a, c, g, or t
  misc_feature (807)..(807): n is a, c, g, or t
  misc_feature (818)..(818): n is a, c, g, or t
  misc_feature (821)..(821): n is a, c, g, or t
  misc_feature (833)..(833): n is a, c, g, or t
  misc_feature (844)..(844): n is a, c, g, or t
  misc_feature (867)..(867): n is a, c, g, or t
  misc_feature (883)..(883): n is a, c, g, or t
  misc_feature (906)..(906): n is a, c, g, or t
  misc_feature (922)..(922): n is a, c, g, or t
  misc_feature (945)..(945): n is a, c, g, or t
  misc_feature (955)..(955): n is a, c, g, or t
  misc_feature (961)..(961): n is a, c, g, or t
  misc_feature (966)..(966): n is a, c, g, or t
  misc_feature (972)..(972): n is a, c, g, or t
  misc_feature (977)..(977): n is a, c, g, or t
  misc_feature (979)..(979): n is a, c, g, or t
  misc_feature (991)..(991): n is a, c, g, or t
  misc_feature (1000)..(1000): n is a, c, g, or t
  misc_feature (1003)..(1003): n is a, c, g, or t
  misc_feature (1005)..(1005): n is a, c, g, or t
  misc_feature (1026)..(1026): n is a, c, g, or t
  misc_feature (1049)..(1049): n is a, c, g, or t
  misc_feature (1063)..(1064): n is a, c, g, or t
  misc_feature (1068)..(1068): n is a, c, g, or t
  misc_feature (1071)..(1072): n is a, c, g, or t
  misc_feature (1074)..(1074): n is a, c, g, or t
  misc_feature (1078)..(1078): n is a, c, g, or t
  misc_feature (1084)..(1085): n is a, c, g, or t
  misc_feature (1091)..(1091): n is a, c, g, or t
  misc_feature (1093)..(1093): n is a, c, g, or t
  misc_feature (1098)..(1098): n is a, c, g, or t
  misc_feature (1103)..(1103): n is a, c, g, or t
  misc_feature (1105)..(1105): n is a, c, g, or t
  misc_feature (1107)..(1107): n is a, c, g, or t
  misc_feature (1110)..(1110): n is a, c, g, or t
  misc_feature (1112)..(1112): n is a, c, g, or t
  misc_feature (1118)..(1118): n is a, c, g, or t
  misc_feature (1120)..(1120): n is a, c, g, or t
  misc_feature (1128)..(1128): n is a, c, g, or t
  misc_feature (1133)..(1133): n is a, c, g, or t
  misc_feature (1137)..(1137): n is a, c, g, or t
  misc_feature (1139)..(1139): n is a, c, g, or t
  misc_feature (1147)..(1148): n is a, c, g, or t
  misc_feature (1150)..(1150): n is a, c, g, or t
  misc_feature (1163)..(1164): n is a, c, g, or t
  misc_feature (1166)..(1167): n is a, c, g, or t
  misc_feature (1170)..(1170): n is a, c, g, or t
  misc_feature (1174)..(1174): n is a, c, g, or t
  misc_feature (1176)..(1176): n is a, c, g, or t
  misc_feature (1178)..(1178): n is a, c, g, or t
  misc_feature (1180)..(1180): n is a, c, g, or t
  misc_feature (1189)..(1189): n is a, c, g, or t
  misc_feature (1192)..(1192): n is a, c, g, or t
  misc_feature (1195)..(1195): n is a, c, g, or t
  misc_feature (1197)..(1197): n is a, c, g, or t
  misc_feature (1204)..(1204): n is a, c, g, or t
  misc_feature (1206)..(1208): n is a, c, g, or t
  misc_feature (1213)..(1213): n is a, c, g, or t
  misc_feature (1221)..(1221): n is a, c, g, or t
  misc_feature (1223)..(1223): n is a, c, g, or t
  misc_feature (1227)..(1232): n is a, c, g, or t
  misc_feature (1245)..(1245): n is a, c, g, or t
  misc_feature (1247)..(1247): n is a, c, g, or t
  misc_feature (1249)..(1251): n is a, c, g, or t
  misc_feature (1253)..(1256): n is a, c, g, or t
  misc_feature (1258)..(1260): n is a, c, g, or t
  misc_feature (1265)..(1265): n is a, c, g, or t
  misc_feature (1267)..(1267): n is a, c, g, or t
  misc_feature (1274)..(1274): n is a, c, g, or t
  misc_feature (1290)..(1291): n is a, c, g, or t
  misc_feature (1294)..(1295): n is a, c, g, or t
  misc_feature (1299)..(1299): n is a, c, g, or t
  misc_feature (1302)..(1302): n is a, c, g, or t
  misc_feature (1309)..(1311): n is a, c, g, or t
  misc_feature (1314)..(1314): n is a, c, g, or t
  misc_feature (1316)..(1316): n is a, c, g, or t
  misc_feature (1331)..(1331): n is a, c, g, or t
  misc_feature (1334)..(1334): n is a, c, g, or t
  misc_feature (1336)..(1337): n is a, c, g, or t
  misc_feature (1342)..(1342): n is a, c, g, or t
  misc_feature (1352)..(1355): n is a, c, g, or t
  misc_feature (1357)..(1361): n is a, c, g, or t
  misc_feature (1373)..(1375): n is a, c, g, or t
  misc_feature (1380)..(1380): n is a, c, g, or t
  misc_feature (1382)..(1382): n is a, c, g, or t
  misc_feature (1384)..(1392): n is a, c, g, or t
aatnagaganaattactatgagaggatcgcatcaccatcaccatcacggatcctatttaggtgacactatagaatcgtcgacccacgcgtccgcggacgcgtgggcggacgcgtgggattttcccgcgtgcgtgtgtgagtgggtgtgtgtgttttcttacaaagggtatttcgcgatcgatcgattgattcgtagttcccccccgcgcgcctttgccctttgtgctgtaatcgagctcccgccatcccaggtgcttctccgttcctctaaacgccagcgtctggacgtgagcgcaggtcgccggtttgtgccttcggtccccgcttcgccccctgccgtcccctccttatcacggtcccgctcgcggcctcgccgccccgctgtctccgccgcccgccatggcgactgcgacccccgtgccgccgcggatgggcagccgcgctggcggccccaccacgccgctgagccccacgcgcctgtcgcggctccaggagaaggaggagctgcgcgagctcaatgaccggctggcggtgtacatcgacaaggtgcgcagcctggagacgganaacagcgcgctgcanctgcaggtgacggagcgcgaggaggtgcgcggccgtgagctcaccggcctcaaggcgctctacgagaccnagctggccgacgcgcgacgcgcgctcgacgacacggcccgcgagcgcgccaagctgcagatcgagctgggcaagtgcaaggcggaacacgaccagctgctcctcaactatgctaanaaggaaatctgatcttaatggcgcccanatcaancttcnagaatatgaancancactgaaattcnaaaagatgcanctcttgctactgcacttggtganaaaaaaagttttaaanggaaaatttggaagaatctgaangatcaaaattgcccanttggaaaacctccttaacttcanccaaaaaaanatttancaaangaaacntttantnaaaataaatttngaaaaatcnttntnaaaaccttaatgaagaacttngaatttcccaaaaaccatgtatnaaaaggaaaataannaaanccnnangaancttaanncccttngnaaaangggantncnggncntcaaantnaaaaaaanaaaanttgncnaaaccctnntnaaaaaaaaaaaannannccnaatnangntnttaaagaanaantgnanaaaattncnnncaaanttaaaaancnaaannnnnnaaaaaaaaaattnantnnnannnncnnnaaaananaaaaccnaaaaaaaaaaactttnnccnntttnatnaaaaaannnaanantttaaaaaaaaaaanaanannttttnaaaaaaaaannnncnnnnnaaaaaaaaaaannnaaaananannnnnnnnna

SEQ ID NO: 186 - DNA, 1375 bp, Homo Sapiens
  misc_feature (1)..(1): n is a, c, g, or t
  misc_feature (934)..(934): n is a, c, g, or t
  misc_feature (944)..(944): n is a, c, g, or t
  misc_feature (954)..(954): n is a, c, g, or t
  misc_feature (976)..(976): n is a, c, g, or t
  misc_feature (981)..(981): n is a, c, g, or t
  misc_feature (1003)..(1003): n is a, c, g, or t
  misc_feature (1021)..(1021): n is a, c, g, or t
  misc_feature (1035)..(1035): n is a, c, g, or t
  misc_feature (1037)..(1037): n is a, c, g, or t
  misc_feature (1040)..(1040): n is a, c, g, or t
  misc_feature (1061)..(1061): n is a, c, g, or t
  misc_feature (1063)..(1063): n is a, c, g, or t
  misc_feature (1065)..(1065): n is a, c, g, or t
  misc_feature (1068)..(1068): n is a, c, g, or t
  misc_feature (1101)..(1101): n is a, c, g, or t
  misc_feature (1103)..(1103): n is a, c, g, or t
  misc_feature (1110)..(1110): n is a, c, g, or t
  misc_feature (1128)..(1128): n is a, c, g, or t
  misc_feature (1132)..(1132): n is a, c, g, or t
  misc_feature (1151)..(1151): n is a, c, g, or t
  misc_feature (1173)..(1173): n is a, c, g, or t
  misc_feature (1178)..(1178): n is a, c, g, or t
  misc_feature (1192)..(1192): n is a, c, g, or t
  misc_feature (1196)..(1196): n is a, c, g, or t
  misc_feature (1200)..(1200): n is a, c, g, or t
  misc_feature (1203)..(1203): n is a, c, g, or t
  misc_feature (1213)..(1213): n is a, c, g, or t
  misc_feature (1216)..(1216): n is a, c, g, or t
  misc_feature (1220)..(1220): n is a, c, g, or t
  misc_feature (1236)..(1236): n is a, c, g, or t
  misc_feature (1239)..(1239): n is a, c, g, or t
  misc_feature (1245)..(1245): n is a, c, g, or t
  misc_feature (1253)..(1254): n is a, c, g, or t
  misc_feature (1257)..(1258): n is a, c, g, or t
  misc_feature (1269)..(1270): n is a, c, g, or t
  misc_feature (1272)..(1273): n is a, c, g, or t
  misc_feature (1279)..(1280): n is a, c, g, or t
  misc_feature (1283)..(1286): n is a, c, g, or t
  misc_feature (1302)..(1302): n is a, c, g, or t
  misc_feature (1305)..(1305): n is a, c, g, or t
  misc_feature (1307)..(1308): n is a, c, g, or t
  misc_feature (1310)..(1310): n is a, c, g, or t
  misc_feature (1314)..(1314): n is a, c, g, or t
  misc_feature (1319)..(1319): n is a, c, g, or t
  misc_feature (1325)..(1327): n is a, c, g, or t
  misc_feature (1329)..(1329): n is a, c, g, or t
  misc_feature (1333)..(1336): n is a, c, g, or t
  misc_feature (1339)..(1342): n is a, c, g, or t
  misc_feature (1346)..(1346): n is a, c, g, or t
  misc_feature (1353)..(1353): n is a, c, g, or t
  misc_feature (1355)..(1355): n is a, c, g, or t
  misc_feature (1362)..(1363): n is a, c, g, or t
  misc_feature (1370)..(1371): n is a, c, g, or t
  misc_feature (1375)..(1375): n is a, c, g, or t
ngaatagagagattaactatgagaggatcgcatcaccatcaccatcacggatcctatttaggtgacactatagaatcgtcgacccacgcgtccgggggcgcggcctccggcggaggagggaacagctgggacctcccgggttcccacgtgcggctgccggggcgtgcacagtctgggacccgtggcggtgctggcaacacaagcaccagctgcggggactccaacagcatctgcccggccccctccacgatgtccaaggccgaggaggccaagaagctggcgggccgcgcggctgtggagaaccacgtgaggaataaccaagtgctgggaattggaagtggttctacaattgtccatgctgtgcagcgaatagctgaaagggtgaagcaagagaatctgaacctcgtctgtattcccacttccttccaggcccgccagctcatcctgcagtatggcttgaccctcagtgatctggatcgacacccagagatcgaccttgccatcgatggtgctgatgaagtagatgctgatctcaatctcatcaagggtggcggaggctgcctgacccaggagaagattgtggctggctatgctagtcgcttcatcgtgatcgctgatttcaggaaagattcgaagaatctcggggatcagtggcacaagggaatccccatcgaggtcatcccaatggcctatgtcccagtgagccgagctgtgagccagaagtttgggggcgtggttgaacttcgaatggctgtcaacaaggctggtcctgtggtgacagataatgggaattttatcttggactggaagtttgaccgggtacacaaatggagtgaagtgaatacagctatcaaaatgatcccaggtgtggtggacacaggcctattcatcaacatggctgaaagagtctactttgggatgcaggatggctcantgaacatganggagaaaccntttctgttgaccctgcaaggancaaantgtgttcaccttgagtctccancccacagccaaggtggangtactctccaggancnttnccttaaagtatctctgcctgnananttntggtgggggtggggggaaaaatggaaggggaantnaatccantcttataaaaattttatnaatnttttttttaaaaaaaaatnaaaaaattttttactattaaanattcnttttttaaagaaanaaanttgnttntgttttttgnaantttncaaaaaaaaaagaggnaantttttnaacctttnnttnntttggggaaanntnnaaattnnttnnnnaaaaaaaaaaaaattnttnanngnaaanggggncccccnnngnttcnnnnccnnnnaaantttattncnccccccnntttttanntttn

SEQ ID NO: 187 - DNA, 1186 bp, Homo Sapiens
  misc_feature (1)..(1): n is a, c, g, or t
  misc_feature (3)..(3): n is a, c, g, or t
  misc_feature (837)..(837): n is a, c, g, or t
  misc_feature (853)..(853): n is a, c, g, or t
  misc_feature (864)..(864): n is a, c, g, or t
  misc_feature (868)..(868): n is a, c, g, or t
  misc_feature (880)..(880): n is a, c, g, or t
  misc_feature (882)..(882): n is a, c, g, or t
  misc_feature (898)..(898): n is a, c, g, or t
  misc_feature (904)..(904): n is a, c, g, or t
  misc_feature (907)..(907): n is a, c, g, or t
  misc_feature (933)..(933): n is a, c, g, or t
  misc_feature (950)..(950): n is a, c, g, or t
  misc_feature (961)..(962): n is a, c, g, or t
  misc_feature (965)..(965): n is a, c, g, or t
  misc_feature (968)..(968): n is a, c, g, or t
  misc_feature (979)..(979): n is a, c, g, or t
  misc_feature (993)..(993): n is a, c, g, or t
  misc_feature (1000)..(1000): n is a, c, g, or t
  misc_feature (1003)..(1003): n is a, c, g, or t
  misc_feature (1006)..(1006): n is a, c, g, or t
  misc_feature (1026)..(1026): n is a, c, g, or t
  misc_feature (1031)..(1031): n is a, c, g, or t
  misc_feature (1038)..(1038): n is a, c, g, or t
  misc_feature (1047)..(1047): n is a, c, g, or t
  misc_feature (1050)..(1050): n is a, c, g, or t
  misc_feature (1054)..(1054): n is a, c, g, or t
  misc_feature (1067)..(1067): n is a, c, g, or t
  misc_feature (1077)..(1077): n is a, c, g, or t
  misc_feature (1079)..(1079): n is a, c, g, or t
  misc_feature (1104)..(1106): n is a, c, g, or t
  misc_feature (1117)..(1117): n is a, c, g, or t
  misc_feature (1127)..(1127): n is a, c, g, or t
  misc_feature (1147)..(1147): n is a, c, g, or t
  misc_feature (1152)..(1152): n is a, c, g, or t
  misc_feature (1172)..(1172): n is a, c, g, or t
  misc_feature (1175)..(1175): n is a, c, g, or t
  misc_feature (1184)..(1185): n is a, c, g, or t
nantagagaaattactatgagaggatcgcatcaccatcaccatcacggatcctatttaggtgacactatagaatcgtcgacccacgcgtccgcggacgcgtgggttgtacgcttgcgggaggaggtgaggaatctctccggcagtctggcggccattcaggaggagatgggtgcctacgggtatgaggacctgcagcaacgggtgatggccctggaggcccggctccacgcctgcgcccagaagctgggctgtgggaagctgaccggggtcagtaaccccatcaccgttcgggccatggggtcccgcttcggctcctggatgactgacacgatggcccccagtgcggatagccgggtctggtacatggatggctattacaaaggccgccgggtcctggagttccgtaccctgggagacttcatcaaaggccagaactttatccagcacctgctgccccagccgtgggcgggcacgggccacgtggtgtacaacggctccctgttctataacaagtaccagagcaacgtggtggtcaaataccacttccgctcgcgctctgtgctggtgcagaggagcctcccgggcgccggttacaacaacaccttcccctactcctggggcggcttctccgacatggacttcatggtggacgagagcgggctctgggctgtgtacaccaccaaccagaacgcgggcaacatcgtggtcagccggctggacccgcacaccctcgaggtcatgcggtcctgggacaccggctaccccaagcgcagcgctggcgaggccttcatgatctgcggtgtgctctacgtgaccaactcccacctggctggggnccaaggtctactttcncctattttacnaacncgtccagttacnantacacggaacgtgccnttccanaancaagtattcccaaatctcgatgctgnataaaacccccggggancgcgccctctnnacntgnaaaaacggccnccaaggtgctctanaatgtcnccntgntttcaggtcatcaacacctntgggnaaccctnaaaccaatnctngtgnttcggcctttttncctggggggncntccggggggtttgggggcccttttnnntttgccggggnccctaaaggngattttttttttttttgtanccccnttttcccccccctttttggnggntttttttcnng

SEQ ID NO: 188 - DNA, 1026 bp, Homo Sapiens
  misc_feature (497)..(497): n is a, c, g, or t
  misc_feature (591)..(591): n is a, c, g, or t
  misc_feature (712)..(712): n is a, c, g, or t
  misc_feature (715)..(715): n is a, c, g, or t
  misc_feature (721)..(723): n is a, c, g, or t
  misc_feature (725)..(725): n is a, c, g, or t
  misc_feature (733)..(733): n is a, c, g, or t
  misc_feature (735)..(735): n is a, c, g, or t
  misc_feature (752)..(752): n is a, c, g, or t
  misc_feature (755)..(755): n is a, c, g, or t
  misc_feature (774)..(774): n is a, c, g, or t
  misc_feature (777)..(777): n is a, c, g, or t
  misc_feature (780)..(780): n is a, c, g, or t
  misc_feature (783)..(783): n is a, c, g, or t
  misc_feature (785)..(785): n is a, c, g, or t
  misc_feature (789)..(789): n is a, c, g, or t
  misc_feature (791)..(791): n is a, c, g, or t
  misc_feature (798)..(798): n is a, c, g, or t
  misc_feature (803)..(803): n is a, c, g, or t
  misc_feature (815)..(817): n is a, c, g, or t
  misc_feature (819)..(821): n is a, c, g, or t
  misc_feature (823)..(824): n is a, c, g, or t
  misc_feature (826)..(826): n is a, c, g, or t
  misc_feature (844)..(844): n is a, c, g, or t
  misc_feature (855)..(855): n is a, c, g, or t
  misc_feature (869)..(869): n is a, c, g, or t
  misc_feature (871)..(871): n is a, c, g, or t
  misc_feature (881)..(882): n is a, c, g, or t
  misc_feature (884)..(884): n is a, c, g, or t
  misc_feature (888)..(888): n is a, c, g, or t
  misc_feature (897)..(897): n is a, c, g, or t
  misc_feature (900)..(900): n is a, c, g, or t
  misc_feature (906)..(907): n is a, c, g, or t
  misc_feature (914)..(914): n is a, c, g, or t
  misc_feature (916)..(918): n is a, c, g, or t
  misc_feature (921)..(922): n is a, c, g, or t
  misc_feature (933)..(933): n is a, c, g, or t
  misc_feature (947)..(955): n is a, c, g, or t
  misc_feature (958)..(959): n is a, c, g, or t
  misc_feature (967)..(967): n is a, c, g, or t
  misc_feature (976)..(978): n is a, c, g, or t
  misc_feature (980)..(982): n is a, c, g, or t
  misc_feature (986)..(987): n is a, c, g, or t
  misc_feature (989)..(991): n is a, c, g, or t
  misc_feature (993)..(993): n is a, c, g, or t
  misc_feature (995)..(995): n is a, c, g, or t
  misc_feature (997)..(999): n is a, c, g, or t
  misc_feature (1001)..(1001): n is a, c, g, or t
  misc_feature (1003)..(1004): n is a, c, g, or t
  misc_feature (1010)..(1012): n is a, c, g, or t
  misc_feature (1015)..(1019): n is a, c, g, or t
  misc_feature (1021)..(1023): n is a, c, g, or t
accatcacggatcctatttaggtgacactatagaatcgtcgacccacgcgtccggcgatgctctgcggacgctggcagaggcccggcgcctctttcccgggcgcgtgtctgtggacttgatgctggggctgccggcacagcaggtggggccgtggcttgggcagctgcaggaactgctgcaccactgtgatgaccacctctccctctaccagctgtccctggagcggggcaccgcactcttcgcccaggtgcagcggggtgcccttccagcccctgacccggagctcgcagctgagatgtaccagaggggccgggctgtccttcgggaggctggcttccaccagtatgaggtctccaactttgcccggaatggggcgctcagtacccacaattggacttactggcagtgtggtcagtaccttggcgttgggcctggggcccatggacgatttatgccccagggggctggaggccacacccgggaggctcggatccanacactggagcctgacaactggatgaaggaggtgatgctgtttggccatggcacccggaagcgtgtccccctgggcaggctggagctgctggagnaagttttggccctggggctacgcaccgatgtggggatcactcaccagcactggcagcagtttgagccccagctgaccctgtgggatgtgtttggagcgaacaaggaaggtgcaggagctgntgnagcggnnncntactgcancntggaatcacagggggtnttncggtgttcctgggaagggnctnggntgngnttgnanttcttcntttgntgaaccctcctnnncnnnanntnccaaaaaaaaccctgggnaaaaaaaaaancccccctccccctntngcccaggaannangaancaaaaatgnttncctttnnttccaangnnnaanngcaaagtgggnttttttaaaaattnnnnnnnnnaannaaaaaacntctcttttnnncnnntgtnnannngncncnnntncnntccttnnnggnnnnntnnncaa

SEQ ID NO: 189 - DNA, 900 bp, Homo Sapiens
  misc_feature (3)..(3): n is a, c, g, or t
  misc_feature (19)..(19): n is a, c, g, or t
  misc_feature (720)..(720): n is a, c, g, or t
  misc_feature (768)..(768): n is a, c, g, or t
  misc_feature (777)..(777): n is a, c, g, or t
  misc_feature (782)..(782): n is a, c, g, or t
  misc_feature (794)..(794): n is a, c, g, or t
  misc_feature (819)..(819): n is a, c, g, or t
  misc_feature (846)..(846): n is a, c, g, or t
  misc_feature (870)..(870): n is a, c, g, or t
  misc_feature (879)..(879): n is a, c, g, or t
  misc_feature (882)..(882): n is a, c, g, or t
  misc_feature (890)..(890): n is a, c, g, or t
  misc_feature (892)..(892): n is a, c, g, or t
  misc_feature (900)..(900): n is a, c, g, or t
ttnttaaagaggagaaatnacttgagaggatcgcatcaccatcaccatcacggatcctatttaggtgacactatagaatcgtcgacccacgcgtccgcctccctctccgagcttgagaatttttcttccgaaataatcagcttcaagtccatggaggacctcgtaaatgaatttgatgagaagctcaatgtctgctttcggaactacaacgccaagaccgagaacctagctcccgtgaagaaccagttacagatccaagaggaggaggagacccttcaggacgaggaggtttgggatgctctgacagacaattacatcccttcactctcagaagactggagggatccaaacatcgaggctctgaatggcaactgctctgacactgagatccatgagaaagaagaggaagagttcaatgagaagagtgaaaatgattccggtatcaacgaggagcctctgctcacagcagatcaggtaattgaggagattgaggaaatgatgcagaactccccagaccctgaggaagaagaggaggttctggaagaagaggatggaggagaaacttcctcccaggcagactcggtcctcctgcaggagatgcaggcattgacacagaccttcaacaacaactggtcctatgaagggctgaggcacatgtctgggtctgagctgaccgagctgctggaccaggtggagggtgccatccgtgacttctcggangagctggtgcagcagctggcccgccgggacgagctggagtttgagaangaagtgaanaactnctttatcacggngcttattgagggtcaaaacaagcanaaagggcagcgagaactgatgaaaaanaggcgggaaagaaaaagggctgancctgcaaancanccggttananaagggaan

SEQ ID NO: 190 - DNA, 831 bp, Homo Sapiens
  misc_feature (783)..(783): n is a, c, g, or t
  misc_feature (802)..(802): n is a, c, g, or t
  misc_feature (806)..(806): n is a, c, g, or t
  misc_feature (813)..(813): n is a, c, g, or t
  misc_feature (828)..(828): n is a, c, g, or t
tcttaaagaggagaattaactatgagaggatcgcatcaccatcaccatcacggatcctatttaggtgacactatagaatcgtcgacccacgcgtccgcggtcctggagctgctgcagcggccggggaacgcgcgctgcgcggactgcggcgccccggatcccgactgggcctcctacactctgggcgtcttcatctgcctgagctgctcgggaatccaccggaatatcccccaggtcagcaaggtgaagtccgtccgcctggacgcctgggaggaggcccaagtggagttcatggcctcccacgggaacgacgccgcgagagccaggtttgagtccaaagtaccctccttctactaccggcccacgccctccgactgccagctccttcgagagcagtggatccgggccaagtacgagcgacaggagttcatctacccggagaagcaggagccctactcggcagggtaccgtgagggttttctctggaagcgtggccgggacaacgggcagtttttgagccggaagtttgtgctgacagaacgagagggtgctctgaagtatttcaacagaaatgatgccaaggagcccaaggccgtgatgaagatcaagcacctgaacgccaccttccagccggccaagatcggccacccccacgggcctgcaggtcacctacctgaaggacaacagcacccgtaacatcttcatctaccatgaggacgggaaggagattgtggactggttcaatgcactccgagctgctcgcttccactacctgcagggggnattcccaggggccagcgangcanatctggngccaaagctctccangaa

SEQ ID NO: 191 - DNA, 869 bp, Homo Sapiens
  misc_feature (664)..(664): n is a, c, g, or t
  misc_feature (700)..(700): n is a, c, g, or t
  misc_feature (702)..(703): n is a, c, g, or t
  misc_feature (707)..(707): n is a, c, g, or t
  misc_feature (712)..(712): n is a, c, g, or t
  misc_feature (717)..(717): n is a, c, g, or t
  misc_feature (723)..(723): n is a, c, g, or t
  misc_feature (748)..(748): n is a, c, g, or t
  misc_feature (759)..(759): n is a, c, g, or t
  misc_feature (776)..(776): n is a, c, g, or t
  misc_feature (783)..(783): n is a, c, g, or t
  misc_feature (809)..(809): n is a, c, g, or t
  misc_feature (811)..(811): n is a, c, g, or t
  misc_feature (834)..(834): n is a, c, g, or t
  misc_feature (841)..(841): n is a, c, g, or t
  misc_feature (852)..(852): n is a, c, g, or t
  misc_feature (857)..(857): n is a, c, g, or t
tcttaaagaggagaattaactatgagaggatcgcatcaccatcaccatcacggatcctatttaggtgacactatagaatcgtcgacccacgcgtccgcggacgcgtgggagacgccatctgcttacgagctgccctatgggaccaaggggagtgaggatctgctcctccgggtgctagccatcaccagctcctccatccccaagaacatccagagcctcaggtgccgccgctgtgtggtcgtggggaacgggcaccggctgcggaacagctcactgggagatgccatcaacaagtacgatgtggtcatcagattgaacaatgccccagtggctggctatgagggtgacgtgggctccaagaccaccatgcgtctcttctaccctgaatctgcccacttcgaccccaaagtagaaaacaacccagacacactcctcgtcctggtagctttcaaggcaatggacttccactggattgagaccatcctgagtgataagaagcgggtgcgaaagggtttctggaaacagcctcccctcatctgggatgtcaatcctaaacagattcggattctcaaccccttcttcatggagattgcagctgacaaactgctgagcctgccaatgcaacagccacggaagattaagcagaagcccaccacgggcctgntggccatcacgctggccctccaccccctggggactngnngcanattgnccggntttggntacccagacgcctacaacaagaagnagaccattccntactatgagcagatccnctcaagncccatgggggggtcaggccataatgntncccaagaggccctggccattaancggatgnttggaaatggnaactntcaagaaacccc

SEQ ID NO: 192 - DNA, 1209 bp, Homo Sapiens
  misc_feature (938)..(938): n is a, c, g, or t
  misc_feature (948)..(948): n is a, c, g, or t
  misc_feature (965)..(965): n is a, c, g, or t
  misc_feature (1010)..(1010): n is a, c, g, or t
  misc_feature (1016)..(1016): n is a, c, g, or t
  misc_feature (1025)..(1025): n is a, c, g, or t
  misc_feature (1028)..(1028): n is a, c, g, or t
  misc_feature (1032)..(1032): n is a, c, g, or t
  misc_feature (1036)..(1036): n is a, c, g, or t
  misc_feature (1041)..(1041): n is a, c, g, or t
  misc_feature (1046)..(1046): n is a, c, g, or t
  misc_feature (1073)..(1073): n is a, c, g, or t
  misc_feature (1088)..(1088): n is a, c, g, or t
  misc_feature (1097)..(1097): n is a, c, g, or t
  misc_feature (1110)..(1110): n is a, c, g, or t
  misc_feature (1116)..(1116): n is a, c, g, or t
  misc_feature (1131)..(1131): n is a, c, g, or t
  misc_feature (1140)..(1140): n is a, c, g, or t
  misc_feature (1153)..(1153): n is a, c, g, or t
  misc_feature (1157)..(1157): n is a, c, g, or t
  misc_feature (1160)..(1160): n is a, c, g, or t
  misc_feature (1174)..(1174): n is a, c, g, or t
  misc_feature (1178)..(1178): n is a, c, g, or t
  misc_feature (1180)..(1180): n is a, c, g, or t
  misc_feature (1184)..(1184): n is a, c, g, or t
  misc_feature (1194)..(1194): n is a, c, g, or t
  misc_feature (1201)..(1201): n is a, c, g, or t
tagagaaattactatgagaggatcgcatcaccatcaccatcacggatcctatttaggtgacactatagaatcgtcgacccacgcgtccggtggcaagggtctgaggcgtccccattgtactgtggaggagggtgttcaaaaagaggaaagagagaagtaccgaaagttattggaacgacttaaagaaagtggtcatggaaactctgtctgtcctgtaacttcaaattatcacagttctcaaagaagtcagatggacacattaaagaccaaaggctggggggaagagcaaaatcacggagtcaaaacaactcagtttgttccaaaacaatatagacttgttgaaacaaggggacctctatgttcattgagaagtgaaaagaggtgttcaaaggggaaaattactgatacagagacgatggtcggaatcagatttgaaaatgaaagtaggaggggataccaactggagcctgacctatcagaagaagtgtcggcccgactccgcctgggcagtggaagcaatggcttactcaggaggaaagtgtcaataattgagacaaaggaaaagaattgctcaggcaaagagagggacagaagaacggacgatctccttgaacttacagaggacatggaaaaggaaatcagtaatgccctaggccatggcccacaggatgaaatcctaagtagtgctttcaaattgcgaattactcgaggagatattcagacattaaagaactatcactggctcaatgatgaagtcattaatttttacatgaatcttctggtggaaagaaataaaaagcaaggctatccagcacttcatgtattcagtactttcttctatcctaaattaaagtctgggggttaccaagcagtggaaacgatggacccaaggggtaaatctctttgaacaaaaaattattctggtgcctattcatcgnaaggtacatnggagcctggtggtgatngacctaaaaaaaagtgtctaaatatctggattctatgggacaaanggcccnaggatctgnganatcncctnccgtntttcnggatgaagtaaacccaaagaatagtgntctaatcttttaagngaccctccngctgaaccccccnaatccncaccctgatgggatnatgggaatnttcttgaattgcnattnttntgggcaactttccntttncncccnagcccctccngaaaaanggggggaa

SEQ ID NO: 193 - DNA, 1249 bp, Homo Sapiens
  misc_feature (905)..(905): n is a, c, g, or t
  misc_feature (924)..(924): n is a, c, g, or t
  misc_feature (938)..(938): n is a, c, g, or t
  misc_feature (949)..(950): n is a, c, g, or t
  misc_feature (952)..(952): n is a, c, g, or t
  misc_feature (954)..(956): n is a, c, g, or t
  misc_feature (960)..(963): n is a, c, g, or t
  misc_feature (967)..(967): n is a, c, g, or t
  misc_feature (970)..(970): n is a, c, g, or t
  misc_feature (972)..(973): n is a, c, g, or t
  misc_feature (976)..(976): n is a, c, g, or t
  misc_feature (978)..(979): n is a, c, g, or t
  misc_feature (981)..(982): n is a, c, g, or t
  misc_feature (986)..(987): n is a, c, g, or t
  misc_feature (990)..(991): n is a, c, g, or t
  misc_feature (997)..(997): n is a, c, g, or t
  misc_feature (1005)..(1006): n is a, c, g, or t
  misc_feature (1009)..(1009): n is a, c, g, or t
  misc_feature (1011)..(1011): n is a, c, g, or t
  misc_feature (1017)..(1017): n is a, c, g, or t
  misc_feature (1021)..(1024): n is a, c, g, or t
  misc_feature (1027)..(1027): n is a, c, g, or t
  misc_feature (1036)..(1036): n is a, c, g, or t
  misc_feature (1041)..(1043): n is a, c, g, or t
  misc_feature (1046)..(1049): n is a, c, g, or t
  misc_feature (1067)..(1067): n is a, c, g, or t
  misc_feature (1078)..(1078): n is a, c, g, or t
  misc_feature (1082)..(1083): n is a, c, g, or t
  misc_feature (1089)..(1090): n is a, c, g, or t
  misc_feature (1095)..(1095): n is a, c, g, or t
  misc_feature (1097)..(1097): n is a, c, g, or t
  misc_feature (1099)..(1099): n is a, c, g, or t
  misc_feature (1102)..(1102): n is a, c, g, or t
  misc_feature (1105)..(1105): n is a, c, g, or t
  misc_feature (1112)..(1112): n is a, c, g, or t
  misc_feature (1114)..(1114): n is a, c, g, or t
  misc_feature (1145)..(1145): n is a, c, g, or t
  misc_feature (1149)..(1149): n is a, c, g, or t
  misc_feature (1162)..(1164): n is a, c, g, or t
  misc_feature (1166)..(1166): n is a, c, g, or t
  misc_feature (1185)..(1186): n is a, c, g, or t
  misc_feature (1212)..(1213): n is a, c, g, or t
  misc_feature (1215)..(1215): n is a, c, g, or t
  misc_feature (1217)..(1218): n is a, c, g, or t
  misc_feature (1233)..(1234): n is a, c, g, or t
  misc_feature (1241)..(1241): n is a, c, g, or t
  misc_feature (1248)..(1248): n is a, c, g, or t
ctattagagaaattactatgagaggatcgcatcaccatcaccatcacggatcctatttaggtgacactatagaatcgtcgacccacgcgtccgcaaacttgaagaaacattttgaacgcaaacatgaaaatcaacaaaaacaatatatatgcagttttgaagactgtaagaagacctttaagaaacatcagcagctgaaaatccatcagtgccagcataccaatgaacctctattcaagtgtacccaggaaggatgtgggaaacactttgcatcacccagcaagctgaaacgacatgccaaggcccacgagggctatgtatgtcaaaaaggatgttcctttgtggcaaaaacatggacggaacttctgaaacatgtgagagaaacccataaagaggaaatactatgtgaagtatgccggaaaacatttaaacgcaaagattaccttaagcaacacatgaaaactcatgccccagaaagggatctatgtcgctgtccaagagaaggctgtggaagaacctatacaactgtgtttaatctccaaagccatatcctctccttccatgaggaaagccgcccttttgtgtgtgaacatgctggctgtggcaaaacatttgcaatgaaacaaagtctcactaggcatgctgttgtacatgatcctgacaagaagaaaatgaagctcaaagtcaaaaaatctcgtgaaaaacggagtttggcctctcatctcagtggatatatccctcccaaaaggaaacaagggcaaggcttatctttgtgtcaaaacggagagtcacccaactgtgtggaagacaagatgctctcgacagttgcagtacttacccttggctaagaactgcactgcttttgtttaaaggactgcagaccaagggagcgagctttctctcanagcatgcttttcttttatnaaattactgatgcngaacattttgnnanannncaannnnatcnacnanntantnnanntaannaanntttctncatccctnntcntnttcatntctnnnnatnccttacttnccttnnnctnnnnaggggggggccccccccntttaggggggncttnnaacccnnttttncngnctnggncccgggntnaataccccaaaaggcccccaaaccccccctnggtntttcaaaccctgnnngnccccgggtttttttttggnnaaccccccctttgggggtttttcggnncngnngtcttgggaaaaaannccggttnccccgtnt

SEQ ID NO: 194 - DNA, 663 bp, Homo Sapiens
  misc_feature (37)..(37): n is a, c, g, or t
  misc_feature (663)..(663): n is a, c, g, or t
tcgagaaatataaaaattatttgctttgtgagcgganacaatataatagattaattgtgagcggataacaatttacacagaattattaaagaggagaaattaactatgagaggatcgcatcaccatcaccatcacggatcctatttaggtgacactatagaatcgtcgacccacgcgtccgactggttcctgggccaggcaggcagctccatcccatcaacttggccccggttctatgacacccgctacaaccaagagacaccaatggagatctgcctcaatggaacccctgctctggcctacctggcgagtgcgcccccacccctgtgtccaagtggccgcactccagacctgaaggctctactcaacgtggtggacaatgcccggagtttcatctacgtcgctgtcatgaactacctgcccactctggagttctcccaccctcacaggttctggcctgccattgacgatgggctgcggcgggccacctacgagcgtggcgtcaaggtgcgcctgctcatcagctgctggggacactcggagccatccatgcgggccttcctgctctctctggctgccctgcgtgacaaccatacccactctgacatccaggtgaaactctttgtggtccccgcggatgaggcccaggctcgaatcccatan

SEQ ID NO: 195 - DNA, 1254 bp, Homo Sapiens
  misc_feature (1)..(2): n is a, c, g, or t
  misc_feature (873)..(873): n is a, c, g, or t
  misc_feature (945)..(945): n is a, c, g, or t
  misc_feature (965)..(965): n is a, c, g, or t
  misc_feature (973)..(973): n is a, c, g, or t
  misc_feature (1014)..(1014): n is a, c, g, or t
  misc_feature (1033)..(1033): n is a, c, g, or t
  misc_feature (1056)..(1056): n is a, c, g, or t
  misc_feature (1066)..(1066): n is a, c, g, or t
  misc_feature (1069)..(1069): n is a, c, g, or t
  misc_feature (1075)..(1075): n is a, c, g, or t
  misc_feature (1077)..(1078): n is a, c, g, or t
  misc_feature (1096)..(1096): n is a, c, g, or t
  misc_feature (1098)..(1098): n is a, c, g, or t
  misc_feature (1114)..(1114): n is a, c, g, or t
  misc_feature (1117)..(1117): n is a, c, g, or t
  misc_feature (1135)..(1135): n is a, c, g, or t
  misc_feature (1139)..(1139): n is a, c, g, or t
  misc_feature (1141)..(1141): n is a, c, g, or t
  misc_feature (1145)..(1146): n is a, c, g, or t
  misc_feature (1152)..(1152): n is a, c, g, or t
  misc_feature (1155)..(1157): n is a, c, g, or t
  misc_feature (1159)..(1159): n is a, c, g, or t
  misc_feature (1161)..(1161): n is a, c, g, or t
  misc_feature (1171)..(1171): n is a, c, g, or t
  misc_feature (1179)..(1179): n is a, c, g, or t
  misc_feature (1183)..(1184): n is a, c, g, or t
  misc_feature (1186)..(1186): n is a, c, g, or t
  misc_feature (1193)..(1193): n is a, c, g, or t
  misc_feature (1196)..(1196): n is a, c, g, or t
  misc_feature (1202)..(1202): n is a, c, g, or t
  misc_feature (1217)..(1217): n is a, c, g, or t
  misc_feature (1226)..(1226): n is a, c, g, or t
  misc_feature (1240)..(1240): n is a, c, g, or t
  misc_feature (1254)..(1254): n is a, c, g, or t
nnaatagagaaattactatgaagaggatcgcatcaccatcaccatcacggatcctatttaggtgacactatagaatcgtcgacccacgcgtccgcggacgcgtgggcggacgcgtggggcaggtctctgtcgagcagcggacgccggtctctgttccgcaggatggggtttgttaaagttgttaagaataaggcctactttaagagataccaagtgaaatttagaagacgacgagagggtaaaactgattattatgctcggaaacgcttggtgatacaagataaaaataaatacaacacacccaaatacaggatgatagttcgtgtgacaaacagagatatcatttgtcagattgcttatgcccgtatagagggggatatgatagtctgcgcagcgtatgcacacgaactgccaaaatatggtgtgaaggttggcctgacaaattatgctgcagcatattgtactggcctgctgctggcccgcaggcttctcaataggtttggcatggacaagatctatgaaggccaagtggaggtgactggtgatgaatacaatgtggaaagcattgatggtcagccaggtgccttcacctgctatttggatgcaggccttgccagaactaccactggcaataaagtttttggtgccctgaagggagctgtggatggaggcttgtctatccctcacagtaccaaacgattccctggttatgattctgaaagcaaggaatttaatgcagaagtacatcggaagcacatcatgggccagaatgttgcagattacatgcgctacttaatggaagaagatgaagatgcttacaagaaacagttctctcaatacataaagaacagcgtaactccagacatgatgganggagatgtataagaaagctcatgctgctatacgagagaatccagtctatgaaaaagaagccccagaaagaanttaaaaagaagaggtggaanccgtcccnaaatgtcccttgctcaaaagaaggatcgggtagctcaaaanaaggcaagctttcctcaanctcaggagcgggctgcctgaaanctaaaccccnccnattttncnntaattttttcaaattaananaaaaaacttttgaccnccnaaaaaaaaaaaaaggggngccncncccnnaggggngcnnntnanctaataaccngacttggncccnngngaaaatnccntaaggncccaaacccccgganttttcaaancccgttgccccggngtttttttgggaan

SEQ ID NO: 196 - DNA, 1419 bp, Homo Sapiens
  misc_feature (1)..(1): n is a, c, g, or t
  misc_feature (812)..(812): n is a, c, g, or t
  misc_feature (834)..(834): n is a, c, g, or t
  misc_feature (854)..(854): n is a, c, g, or t
  misc_feature (893)..(893): n is a, c, g, or t
  misc_feature (901)..(902): n is a, c, g, or t
  misc_feature (905)..(905): n is a, c, g, or t
  misc_feature (944)..(944): n is a, c, g, or t
  misc_feature (959)..(959): n is a, c, g, or t
  misc_feature (963)..(963): n is a, c, g, or t
  misc_feature (987)..(987): n is a, c, g, or t
  misc_feature (1015)..(1015): n is a, c, g, or t
  misc_feature (1019)..(1019): n is a, c, g, or t
  misc_feature (1025)..(1025): n is a, c, g, or t
  misc_feature (1038)..(1038): n is a, c, g, or t
  misc_feature (1043)..(1044): n is a, c, g, or t
  misc_feature (1070)..(1070): n is a, c, g, or t
  misc_feature (1081)..(1081): n is a, c, g, or t
  misc_feature (1084)..(1084): n is a, c, g, or t
  misc_feature (1088)..(1088): n is a, c, g, or t
  misc_feature (1090)..(1090): n is a, c, g, or t
  misc_feature (1096)..(1096): n is a, c, g, or t
  misc_feature (1127)..(1127): n is a, c, g, or t
  misc_feature (1134)..(1134): n is a, c, g, or t
  misc_feature (1136)..(1136): n is a, c, g, or t
  misc_feature (1139)..(1139): n is a, c, g, or t
  misc_feature (1149)..(1149): n is a, c, g, or t
  misc_feature (1160)..(1160): n is a, c, g, or t
  misc_feature (1167)..(1167): n is a, c, g, or t
  misc_feature (1174)..(1174): n is a, c, g, or t
  misc_feature (1182)..(1182): n is a, c, g, or t
  misc_feature (1185)..(1185): n is a, c, g, or t
  misc_feature (1188)..(1189): n is a, c, g, or t
  misc_feature (1194)..(1194): n is a, c, g, or t
  misc_feature (1197)..(1197): n is a, c, g, or t
  misc_feature (1207)..(1207): n is a, c, g, or t
  misc_feature (1222)..(1222): n is a, c, g, or t
  misc_feature (1231)..(1231): n is a, c, g, or t
  misc_feature (1235)..(1235): n is a, c, g, or t
  misc_feature (1249)..(1249): n is a, c, g, or t
  misc_feature (1251)..(1251): n is a, c, g, or t
  misc_feature (1258)..(1258): n is a, c, g, or t
  misc_feature (1267)..(1267): n is a, c, g, or t
  misc_feature (1272)..(1272): n is a, c, g, or t
  misc_feature (1274)..(1275): n is a, c, g, or t
  misc_feature (1280)..(1280): n is a, c, g, or t
  misc_feature (1294)..(1295): n is a, c, g, or t
  misc_feature (1297)..(1297): n is a, c, g, or t
  misc_feature (1302)..(1305): n is a, c, g, or t
  misc_feature (1320)..(1321): n is a, c, g, or t
  misc_feature (1327)..(1327): n is a, c, g, or t
  misc_feature (1334)..(1334): n is a, c, g, or t
  misc_feature (1339)..(1339): n is a, c, g, or t
  misc_feature (1343)..(1343): n is a, c, g, or t
  misc_feature (1347)..(1347): n is a, c, g, or t
  misc_feature (1349)..(1349): n is a, c, g, or t
  misc_feature (1361)..(1362): n is a, c, g, or t
  misc_feature (1369)..(1370): n is a, c, g, or t
  misc_feature (1372)..(1372): n is a, c, g, or t
  misc_feature (1374)..(1374): n is a, c, g, or t
  misc_feature (1386)..(1386): n is a, c, g, or t
  misc_feature (1388)..(1388): n is a, c, g, or t
  misc_feature (1397)..(1397): n is a, c, g, or t
  misc_feature (1399)..(1399): n is a, c, g, or t
  misc_feature (1403)..(1404): n is a, c, g, or t
  misc_feature (1410)..(1410): n is a, c, g, or t
  misc_feature (1415)..(1415): n is a, c, g, or t
  misc_feature (1417)..(1417): n is a, c, g, or t
naattagagaaaattaactatgagaggatcgcatcaccatcaccatcacggatcctatttaggtgacactatagaatcgtcgacccacgcgtccggcggcgaacgcggagagcacgccatgaaggcttcgggcacgctacgagagtacaaggtagtgggtcgctgcctgcccacccccaaatgccacacgccgcccctctaccgcatgcgaatctttgcgcctaatcatgtcgtcgccaagtcccgcttctggtactttgtatctcagttaaagaagatgaagaagtcttcaggggagattgtctactgtgggcaggtgtttgagaagtcccccctgcgggtgaagaacttcgggatctggctgcgctatgactcccggagcggcacccacaacatgtaccgggaataccgggacctgaccaccgcaggcgctgtcacccagtgctaccgagacatgggtgcccggcaccgcgcccgagcccactccattcagatcatgaaggtggaggagatcgcggccagcaagtgccgccggccggctgtcaagcagttccacgactccaagatcaagttcccgctgccccaccgggtcctgcgccgtcagcacaagccacgcttcaccaccaagaggcccaacaccttcttctaggtgcagggccctcgtccgggtgtgccccaaataaactcaggaacgccccggtaaaaaaaaaaaaaaaaaaaaaaaaaaagggcggccgctccctatagtgagtcgtattaagcttaattagctgagcttggactcctgttgatagatccagtaatgacctcanaactccatctggatttgttcanaacgctcggttgccgccggncgttttttattggtgagaatccaaactagctttggcganaattttcnngancttaaggaaacctaaaatggaaaaaaaaatccctggaanataccaccgtttaanatantcccaatgggcatcgaaaaaaaanattttgaggcatttcagtcagtttgctnatgntacctntaaccaaacgttnaactnnaaatttacggccttttttaaaaacgntaaaaaaaaanaancccnantttttntcccggctttttttcaaatttttgccccccngaaaaangnccntccggaattnctattggaaanaaaaaanggtgaantgggaaanggnaanngttcnccnttttaaaccntttccagaaaaaatnaaagttttnctcntttggaggaaaaancnaaatttncgggatttnttaanannttccnaaaaggggggtttnngnaaaannnncctttccaaaggttnnaaaaanttttttncccancccngggnantccctttttttnnggcaaannanantttccccctttncngggaatatnanaggnnaaggtntcttntntt

SEQ ID NO: 197 - DNA, 1334 bp, Homo Sapiens
  misc_feature (2)..(2): n is a, c, g, or t
  misc_feature (683)..(683): n is a, c, g, or t
  misc_feature (809)..(810): n is a, c, g, or t
  misc_feature (812)..(813): n is a, c, g, or t
  misc_feature (818)..(818): n is a, c, g, or t
  misc_feature (820)..(820): n is a, c, g, or t
  misc_feature (824)..(824): n is a, c, g, or t
  misc_feature (830)..(830): n is a, c, g, or t
  misc_feature (832)..(832): n is a, c, g, or t
  misc_feature (835)..(835): n is a, c, g, or t
  misc_feature (837)..(837): n is a, c, g, or t
  misc_feature (839)..(839): n is a, c, g, or t
  misc_feature (841)..(843): n is a, c, g, or t
  misc_feature (847)..(847): n is a, c, g, or t
  misc_feature (849)..(850): n is a, c, g, or t
  misc_feature (852)..(852): n is a, c, g, or t
  misc_feature (855)..(858): n is a, c, g, or t
  misc_feature (861)..(863): n is a, c, g, or t
  misc_feature (874)..(876): n is a, c, g, or t
  misc_feature (880)..(884): n is a, c, g, or t
  misc_feature (887)..(888): n is a, c, g, or t
  misc_feature (890)..(890): n is a, c, g, or t
  misc_feature (892)..(892): n is a, c, g, or t
  misc_feature (894)..(899): n is a, c, g, or t
  misc_feature (901)..(901): n is a, c, g, or t
  misc_feature (903)..(905): n is a, c, g, or t
  misc_feature (907)..(907): n is a, c, g, or t
  misc_feature (909)..(909): n is a, c, g, or t
  misc_feature (911)..(911): n is a, c, g, or t
  misc_feature (913)..(913): n is a, c, g, or t
  misc_feature (917)..(917): n is a, c, g, or t
  misc_feature (919)..(920): n is a, c, g, or t
  misc_feature (922)..(925): n is a, c, g, or t
  misc_feature (932)..(942): n is a, c, g, or t
  misc_feature (944)..(944): n is a, c, g, or t
  misc_feature (947)..(947): n is a, c, g, or t
  misc_feature (949)..(950): n is a, c, g, or t
  misc_feature (952)..(952): n is a, c, g, or t
  misc_feature (954)..(955): n is a, c, g, or t
  misc_feature (957)..(957): n is a, c, g, or t
  misc_feature (961)..(963): n is a, c, g, or t
  misc_feature (966)..(967): n is a, c, g, or t
  misc_feature (969)..(970): n is a, c, g, or t
  misc_feature (973)..(973): n is a, c, g, or t
  misc_feature (975)..(975): n is a, c, g, or t
  misc_feature (983)..(987): n is a, c, g, or t
  misc_feature (996)..(996): n is a, c, g, or t
  misc_feature (998)..(998): n is a, c, g, or t
  misc_feature (1002)..(1002): n is a, c, g, or t
  misc_feature (1004)..(1004): n is a, c, g, or t
  misc_feature (1006)..(1006): n is a, c, g, or t
  misc_feature (1010)..(1010): n is a, c, g, or t
  misc_feature (1013)..(1014): n is a, c, g, or t
  misc_feature (1021)..(1031): n is a, c, g, or t
  misc_feature (1035)..(1041): n is a, c, g, or t
  misc_feature (1043)..(1043): n is a, c, g, or t
  misc_feature (1049)..(1049): n is a, c, g, or t
  misc_feature (1051)..(1052): n is a, c, g, or t
  misc_feature (1054)..(1055): n is a, c, g, or t
  misc_feature (1060)..(1060): n is a, c, g, or t
  misc_feature (1063)..(1067): n is a, c, g, or t
  misc_feature (1069)..(1072): n is a, c, g, or t
  misc_feature (1074)..(1075): n is a, c, g, or t
  misc_feature (1080)..(1080): n is a, c, g, or t
  misc_feature (1082)..(1082): n is a, c, g, or t
  misc_feature (1084)..(1084): n is a, c, g, or t
  misc_feature (1086)..(1087): n is a, c, g, or t
  misc_feature (1089)..(1091): n is a, c, g, or t
  misc_feature (1094)..(1094): n is a, c, g, or t
  misc_feature (1098)..(1098): n is a, c, g, or t
  misc_feature (1101)..(1101): n is a, c, g, or t
  misc_feature (1105)..(1108): n is a, c, g, or t
  misc_feature (1112)..(1112): n is a, c, g, or t
  misc_feature (1116)..(1117): n is a, c, g, or t
  misc_feature (1121)..(1122): n is a, c, g, or t
  misc_feature (1126)..(1128): n is a, c, g, or t
  misc_feature (1132)..(1135): n is a, c, g, or t
  misc_feature (1138)..(1138): n is a, c, g, or t
  misc_feature (1142)..(1145): n is a, c, g, or t
  misc_feature (1148)..(1149): n is a, c, g, or t
  misc_feature (1154)..(1158): n is a, c, g, or t
  misc_feature (1162)..(1162): n is a, c, g, or t
  misc_feature (1165)..(1165): n is a, c, g, or t
  misc_feature (1167)..(1167): n is a, c, g, or t
  misc_feature (1169)..(1170): n is a, c, g, or t
  misc_feature (1172)..(1174): n is a, c, g, or t
  misc_feature (1176)..(1177): n is a, c, g, or t
  misc_feature (1180)..(1181): n is a, c, g, or t
  misc_feature (1183)..(1186): n is a, c, g, or t
  misc_feature (1190)..(1190): n is a, c, g, or t
  misc_feature (1192)..(1192): n is a, c, g, or t
  misc_feature (1196)..(1198): n is a, c, g, or t
  misc_feature (1201)..(1204): n is a, c, g, or t
  misc_feature (1206)..(1207): n is a, c, g, or t
  misc_feature (1214)..(1215): n is a, c, g, or t
  misc_feature (1222)..(1224): n is a, c, g, or t
  misc_feature (1226)..(1227): n is a, c, g, or t
  misc_feature (1230)..(1230): n is a, c, g, or t
  misc_feature (1233)..(1233): n is a, c, g, or t
  misc_feature (1236)..(1236): n is a, c, g, or t
  misc_feature (1239)..(1247): n is a, c, g, or t
  misc_feature (1249)..(1250): n is a, c, g, or t
  misc_feature (1252)..(1252): n is a, c, g, or t
  misc_feature (1254)..(1254): n is a, c, g, or t
  misc_feature (1260)..(1261): n is a, c, g, or t
  misc_feature (1265)..(1266): n is a, c, g, or t
  misc_feature (1269)..(1270): n is a, c, g, or t
  misc_feature (1272)..(1272): n is a, c, g, or t
  misc_feature (1274)..(1275): n is a, c, g, or t
  misc_feature (1277)..(1279): n is a, c, g, or t
  misc_feature (1281)..(1281): n is a, c, g, or t
  misc_feature (1290)..(1291): n is a, c, g, or t
  misc_feature (1298)..(1301): n is a, c, g, or t
  misc_feature (1303)..(1305): n is a, c, g, or t
  misc_feature (1307)..(1308): n is a, c, g, or t
  misc_feature (1310)..(1310): n is a, c, g, or t
  misc_feature (1313)..(1318): n is a, c, g, or t
  misc_feature (1326)..(1327): n is a, c, g, or t
  misc_feature (1329)..(1329): n is a, c, g, or t
  misc_feature (1333)..(1333): n is a, c, g, or t
antagagaaattactatgagaggatcgcatcaccatcaccatcacggatcctatttaggtgacactatagaatcgtcgacccacgcgtccggcacaatgggggccgcaaaaaaggcggggcctggcggaccagcgggcgagggccctgggagatggtgctcgtcgtgcacggcttcccgtcctccgtggccgcccttcggtttgagtgggcttggcagcacccgcacgcctcgcgccgcctggcgcacgtggggcctcgcctgcgaggagagacagccttcgctttccacctgcgcgtgctggcgcacatgctgcgcgcaccgccctgggctcgcctcccgctcacgctgcgctgggtgcgcccagacctccgccaggacctctgcctcccgccgccgccgcacgtgcctctggccttcgggcctccaccgccccaggccccggccccaaggcgccgcgcaggtccctttgatgacgcggagcctgagccagaccagggggatccaggggcctgctgctccatgtgatctgcctggcagaggagtttcttcaggaagaaccagggcagcttctgcccctagagggccaatgcccttgctgtgagaagtcactgctttggggagacctgatctggctgtgccagatggacactgagaaagaagtagaagactcagaattagaanaggcacactggacagacctgctggagacctgatcctcagtgtccttaccccctcctacctcttttctgtgccacctgctgtgggtccagcaggtttttacttgagtacaataaaaagtctgagtcnnannaaaantnaaanaaaaananaanananannnatanannanaannnnggnnnccaccctttannnattnnnnnaannananannnnnnanannnananananaaananncnnnntttattnnnnnnnnnnntnaananntntnnanaaannnaanntnnaananattttttnnnnnaaaaaaaananatanantnttanaannatttttnnnnnnnnnnnattnnnnnnnanaaaaanannannaaaanaannnnnannnnannaattntnantnncnnnaanaaantanaaannnnaatncacnnaaannaaannnaaannnnatntttnnnnaannaaaannnnnaaanaananannannntnnaannannnnaaananttannntcnnnntnnaatattnnaaaattnnnannaanatnaanaannnnnnnnnannananattaannaaannaannananncnnnanttttaaaanntaaaaannnntnnntnnanaannnnnnaaaaaaanncnattnc

SEQ ID NO: 198 - DNA, 1263 bp, Homo Sapiens
  misc_feature (1)..(10): n is a, c, g, or t
  misc_feature (626)..(626): n is a, c, g, or t
  misc_feature (777)..(777): n is a, c, g, or t
  misc_feature (867)..(867): n is a, c, g, or t
  misc_feature (878)..(879): n is a, c, g, or t
  misc_feature (891)..(891): n is a, c, g, or t
  misc_feature (900)..(900): n is a, c, g, or t
  misc_feature (922)..(922): n is a, c, g, or t
  misc_feature (926)..(926): n is a, c, g, or t
  misc_feature (937)..(937): n is a, c, g, or t
  misc_feature (939)..(939): n is a, c, g, or t
  misc_feature (954)..(954): n is a, c, g, or t
  misc_feature (969)..(969): n is a, c, g, or t
  misc_feature (983)..(983): n is a, c, g, or t
  misc_feature (990)..(991): n is a, c, g, or t
  misc_feature (1003)..(1003): n is a, c, g, or t
  misc_feature (1032)..(1032): n is a, c, g, or t
  misc_feature (1036)..(1036): n is a, c, g, or t
  misc_feature (1040)..(1040): n is a, c, g, or t
  misc_feature (1059)..(1059): n is a, c, g, or t
  misc_feature (1061)..(1061): n is a, c, g, or t
  misc_feature (1078)..(1078): n is a, c, g, or t
  misc_feature (1095)..(1095): n is a, c, g, or t
  misc_feature (1098)..(1098): n is a, c, g, or t
  misc_feature (1103)..(1103): n is a, c, g, or t
  misc_feature (1113)..(1113): n is a, c, g, or t
  misc_feature (1115)..(1116): n is a, c, g, or t
  misc_feature (1121)..(1121): n is a, c, g, or t
  misc_feature (1129)..(1130): n is a, c, g, or t
  misc_feature (1140)..(1140): n is a, c, g, or t
  misc_feature (1144)..(1144): n is a, c, g, or t
  misc_feature (1153)..(1153): n is a, c, g, or t
  misc_feature (1157)..(1157): n is a, c, g, or t
  misc_feature (1159)..(1159): n is a, c, g, or t
  misc_feature (1163)..(1163): n is a, c, g, or t
  misc_feature (1167)..(1168): n is a, c, g, or t
  misc_feature (1182)..(1182): n is a, c, g, or t
  misc_feature (1184)..(1184): n is a, c, g, or t
  misc_feature (1192)..(1192): n is a, c, g, or t
  misc_feature (1210)..(1210): n is a, c, g, or t
  misc_feature (1215)..(1215): n is a, c, g, or t
  misc_feature (1217)..(1217): n is a, c, g, or t
  misc_feature (1231)..(1232): n is a, c, g, or t
  misc_feature (1235)..(1236): n is a, c, g, or t
  misc_feature (1238)..(1239): n is a, c, g, or t
  misc_feature (1245)..(1245): n is a, c, g, or t
  misc_feature (1250)..(1250): n is a, c, g, or t
nnnnnnnnnnaattagaggaaaattaacttatgagagggatcgcatcaccattcaccatcacggatcctatttaggtgacactatagaatcgtcgacccacgcgtccgctctcgctccgaggtccccgcgccagagacgcagccgcgctcccaccacccacacccaccgcgccctcgttcgcctcttctccgggagccagtccgcgccaccgccgccgcccaggccatcgccaccctccgcagccatgtccaccaggtccgtgtcctcgtcctcctaccgcaggatgttcggcggcccgggcaccgcgagccggccgagctccagccggagctacgtgactacgtccacccgcacctacagcctgggcagcgcgctgcgccccagcaccagccgcagcctctacgcctcgtccccgggcggcgtgtatgccacgcgctcctctgccgtgcgcctgcggagcagcgtgcccggggtgcggctcctgcaggactcggtggacttctcgctggccgacgccatcaacaccgagttcaagaacacccgcaccaacgagaaggtggagctgcaggagctgaatgaccgcttcgccaactacatcgacaaggtgcgcttcctggagcagcanaataagatcctgctggccgagctcgagcagctcaagggccaaggcaagtcgcgcctgggggacctctacgaggaggagatgcgggagctgcgccggcaggtggaccagctaaccaacgacaaagcccgcgtcgaggtggagcgcgacaacntggccgaggacatcatgcgcctccgggagaaattgcaggaggagatgcttcagagagaggaagccgaaaacaccctgcaattctttcaanacaggatgttnnacaatgcgtctntggcacgtnttgaccttgaaacgcaaagtgnaatntttgcaagaananattgcctttttgaanaaactccacgaaaangaaatccaggaagntgcaggnntcaaaattaagnaaaagcatgtccaaattcgaatgtggatntttncaanccttgaacttaagggttgncntggggtgaagttagttnaacaatttgaaaagtgnggntgccnaaaaacttgnannaaggnaaaaaaannggtaaaaatncaanttttttgancttntntganggtnnccaacggaaaaatnanccccttgngccaggaaaaaaggaatnccttnantacggaaaaagggnnaanncnncccttnggaangggaaggccttta

SEQ ID NO: 199 - DNA, 1431 bp, Homo Sapiens
  misc_feature (1)..(1): n is a, c, g, or t
  misc_feature (3)..(3): n is a, c, g, or t
  misc_feature (845)..(845): n is a, c, g, or t
  misc_feature (876)..(876): n is a, c, g, or t
  misc_feature (880)..(880): n is a, c, g, or t
  misc_feature (930)..(930): n is a, c, g, or t
  misc_feature (952)..(952): n is a, c, g, or t
  misc_feature (967)..(967): n is a, c, g, or t
  misc_feature (978)..(978): n is a, c, g, or t
  misc_feature (985)..(985): n is a, c, g, or t
  misc_feature (990)..(990): n is a, c, g, or t
  misc_feature (1000)..(1000): n is a, c, g, or t
  misc_feature (1014)..(1014): n is a, c, g, or t
  misc_feature (1032)..(1032): n is a, c, g, or t
  misc_feature (1041)..(1041): n is a, c, g, or t
  misc_feature (1052)..(1052): n is a, c, g, or t
  misc_feature (1058)..(1058): n is a, c, g, or t
  misc_feature (1065)..(1066): n is a, c, g, or t
  misc_feature (1068)..(1068): n is a, c, g, or t
  misc_feature (1075)..(1076): n is a, c, g, or t
  misc_feature (1079)..(1079): n is a, c, g, or t
  misc_feature (1082)..(1082): n is a, c, g, or t
  misc_feature (1087)..(1087): n is a, c, g, or t
  misc_feature (1098)..(1099): n is a, c, g, or t
  misc_feature (1101)..(1102): n is a, c, g, or t
  misc_feature (1111)..(1111): n is a, c, g, or t
  misc_feature (1122)..(1122): n is a, c, g, or t
  misc_feature (1125)..(1125): n is a, c, g, or t
  misc_feature (1151)..(1151): n is a, c, g, or t
  misc_feature (1156)..(1157): n is a, c, g, or t
  misc_feature (1170)..(1171): n is a, c, g, or t
  misc_feature (1173)..(1174): n is a, c, g, or t
  misc_feature (1192)..(1193): n is a, c, g, or t
  misc_feature (1197)..(1197): n is a, c, g, or t
  misc_feature (1225)..(1225): n is a, c, g, or t
  misc_feature (1237)..(1237): n is a, c, g, or t
  misc_feature (1240)..(1241): n is a, c, g, or t
  misc_feature (1247)..(1247): n is a, c, g, or t
  misc_feature (1254)..(1254): n is a, c, g, or t
  misc_feature (1263)..(1263): n is a, c, g, or t
  misc_feature (1271)..(1271): n is a, c, g, or t
  misc_feature (1273)..(1273): n is a, c, g, or t
  misc_feature (1276)..(1276): n is a, c, g, or t
  misc_feature (1278)..(1278): n is a, c, g, or t
  misc_feature (1294)..(1294): n is a, c, g, or t
  misc_feature (1297)..(1298): n is a, c, g, or t
  misc_feature (1309)..(1309): n is a, c, g, or t
  misc_feature (1323)..(1323): n is a, c, g, or t
  misc_feature (1326)..(1326): n is a, c, g, or t
  misc_feature (1343)..(1344): n is a, c, g, or t
  misc_feature (1351)..(1351): n is a, c, g, or t
  misc_feature (1359)..(1360): n is a, c, g, or t
  misc_feature (1362)..(1362): n is a, c, g, or t
  misc_feature (1379)..(1379): n is a, c, g, or t
  misc_feature (1392)..(1392): n is a, c, g, or t
  misc_feature (1398)..(1398): n is a, c, g, or t
  misc_feature (1409)..(1410): n is a, c, g, or t
  misc_feature (1414)..(1414): n is a, c, g, or t
  misc_feature (1417)..(1417): n is a, c, g, or t
  misc_feature (1419)..(1420): n is a, c, g, or t
  misc_feature (1425)..(1427): n is a, c, g, or t
ntnttagagaaattactatgagaggatcgcatcaccatcaccatcacggatcctatttaggtgacactatagaatcgtcgacccacgcgtccgctacggtggacacagcggccctgaagcagcctccggcgccccctccgccacccccgccagtgtcggcgcccgcggccgaggccgcgccccccgcctccgccgccactatcgccgcggcggcggccaccgccgtcgtagccccaacctcgacggtcgccgtggccccggtcgcgtctgccttggagaagaagacaaagagcaaggggccctacatctgcgctctgtgcgccaaggagttcaagaacggctacaatctccggaggcacgaagccatccacacgggagccaaggccggccgggtcccctcgggtgctatgaagatgccgaccatggtgcccctgagcctcctgagcgtgccccagctgagcggagccggcgggggagggggagaggcgggtgccggcggcggcgctgccgcagtggccgccggtggcgtggtgaccacgaccgcctcggggaagcgcatccggaagaaccatgcctgcgagatgtgtggcaaggccttccgcgacgtctaccacctgaaccgacacaagctgtcgcactcggacgagaagccctaccagtgcccggtgtgccagcagcgcttcaagcgcaaggaccgcatgagctaccacgtgcgctcacatgacggcgctgtgcacaagccctacaactgctcccactgtggcaagagcttctcccggccggatcacctcaacagtcacgtcagacaagtgcactcaacagaacggccctttcaaatgtgaganatgtgaggcagcttttcgccacgaaaggatngggntgcgggcgcacacagtacgaacacgaagaagaaagtgccatgttcacgtnttgtggcaagatgctgaacctnggctttatatttcgnaacaaatgaanggtgcanagccnagggttcttnacaatgttttgttnaacttctgcaaaaaaaangtactggtnaaggtttgtcnaatggngggcggnnancgacaannggngtnaatcngaaaaatcggnnannaataaacanccccttccaanaantttgggtttccttttcgggggcgaanggggnnctttttaattttnnannattttcttccaaccttgnnaatncaatttttttcggggaaaaaggaaaaantgaataaaatcnttnnaaaaantcttttnccctttttncccaattntnttntnaaaaccaagaattccnaannaaaaaaaaatnttttttaggaaatncanttttaaaattttttttnnctttttnaaaaaaannanaaatttttttttttttnatcccaaaggggnggggtnaaaaaaaaaanntccntcncnntttannntgtt

SEQ ID NO: 200 - DNA, 799 bp, Homo Sapiens
  misc_feature (2)..(4): n is a, c, g, or t
  misc_feature (607)..(607): n is a, c, g, or t
  misc_feature (610)..(610): n is a, c, g, or t
  misc_feature (614)..(614): n is a, c, g, or t
  misc_feature (617)..(623): n is a, c, g, or t
  misc_feature (625)..(626): n is a, c, g, or t
  misc_feature (628)..(629): n is a, c, g, or t
  misc_feature (631)..(633): n is a, c, g, or t
  misc_feature (799)..(799): n is a, c, g, or t
tnnnctatgagaggatcgcatcaccatcaccatcacggatcctatttaggtgacactatagaatcgtcgacccacgcgtccggcacagagcgttttgtatgtagtccagatgaagttatggataccatagatgaaggaaaatccaacagacatgtagcagttacaaatatgaatgaacatagctctaggagtcacagtatatttcttattaatgtcaaacaagagaacacacaaacggaacaaaagctgagtggaaaactttatctggttgatttagctggtagtgaaaaggttagtaaaactggagctgaaggtgctgtgctggatgaagctaaaaacatcaacaagtcactttctgctcttggaaatgttatttctgctttggctgagggtagtacatatgttccatatcgagatagtaaaatgacaagaatccttcaagattcattaggtggcaactgtagaaccactattgtaatttgctgctctccatcatcatacaatgagtctgaaacaaaatctacactcttatttggccaaagggccaaaacaattaagaacacagtttgtgtcaatgtggagttaactgcagaacagtgggaaaaanaanaaanaannnnnnnannannannnaaagggcggccgctccctatagtgagtcgtattaagcttaattagctgagcttggactcctgttgatagatccagtaatgacctcagaactccatctggatttgttcagaacgctcggttgccgccgggcgttttttattggggagaatccaagctagcttggggn

SEQ ID NO: 201 - DNA, 1463 bp, Homo Sapiens
  misc_feature (232)..(232): n is a, c, g, or t
  misc_feature (475)..(475): n is a, c, g, or t
  misc_feature (553)..(553): n is a, c, g, or t
  misc_feature (596)..(596): n is a, c, g, or t
  misc_feature (608)..(608): n is a, c, g, or t
  misc_feature (635)..(635): n is a, c, g, or t
  misc_feature (649)..(649): n is a, c, g, or t
  misc_feature (657)..(657): n is a, c, g, or t
  misc_feature (715)..(715): n is a, c, g, or t
  misc_feature (730)..(730): n is a, c, g, or t
  misc_feature (735)..(735): n is a, c, g, or t
  misc_feature (747)..(747): n is a, c, g, or t
  misc_feature (752)..(752): n is a, c, g, or t
  misc_feature (765)..(766): n is a, c, g, or t
  misc_feature (779)..(779): n is a, c, g, or t
  misc_feature (787)..(788): n is a, c, g, or t
  misc_feature (827)..(828): n is a, c, g, or t
  misc_feature (843)..(843): n is a, c, g, or t
  misc_feature (845)..(845): n is a, c, g, or t
  misc_feature (861)..(861): n is a, c, g, or t
  misc_feature (882)..(882): n is a, c, g, or t
  misc_feature (886)..(886): n is a, c, g, or t
  misc_feature (889)..(889): n is a, c, g, or t
  misc_feature (899)..(900): n is a, c, g, or t
  misc_feature (908)..(909): n is a, c, g, or t
  misc_feature (911)..(913): n is a, c, g, or t
  misc_feature (929)..(929): n is a, c, g, or t
  misc_feature (933)..(933): n is a, c, g, or t
  misc_feature (942)..(942): n is a, c, g, or t
  misc_feature (948)..(948): n is a, c, g, or t
  misc_feature (956)..(957): n is a, c, g, or t
  misc_feature (970)..(970): n is a, c, g, or t
  misc_feature (976)..(976): n is a, c, g, or t
  misc_feature (985)..(986): n is a, c, g, or t
  misc_feature (991)..(991): n is a, c, g, or t
  misc_feature (1001)..(1001): n is a, c, g, or t
  misc_feature (1006)..(1006): n is a, c, g, or t
  misc_feature (1008)..(1008): n is a, c, g, or t
  misc_feature (1016)..(1016): n is a, c, g, or t
  misc_feature (1024)..(1024): n is a, c, g, or t
  misc_feature (1032)..(1032): n is a, c, g, or t
  misc_feature (1041)..(1042): n is a, c, g, or t
  misc_feature (1049)..(1050): n is a, c, g, or t
  misc_feature (1052)..(1052): n is a, c, g, or t
  misc_feature (1054)..(1054): n is a, c, g, or t
  misc_feature (1065)..(1065): n is a, c, g, or t
  misc_feature (1067)..(1067): n is a, c, g, or t
  misc_feature (1075)..(1075): n is a, c, g, or t
  misc_feature (1078)..(1078): n is a, c, g, or t
  misc_feature (1090)..(1090): n is a, c, g, or t
  misc_feature (1094)..(1094): n is a, c, g, or t
  misc_feature (1104)..(1105): n is a, c, g, or t
  misc_feature (1116)..(1117): n is a, c, g, or t
  misc_feature (1129)..(1130): n is a, c, g, or t
  misc_feature (1138)..(1138): n is a, c, g, or t
  misc_feature (1141)..(1142): n is a, c, g, or t
  misc_feature (1146)..(1147): n is a, c, g, or t
  misc_feature (1153)..(1153): n is a, c, g, or t
  misc_feature (1158)..(1158): n is a, c, g, or t
  misc_feature (1167)..(1167): n is a, c, g, or t
  misc_feature (1169)..(1169): n is a, c, g, or t
  misc_feature (1171)..(1171): n is a, c, g, or t
  misc_feature (1173)..(1173): n is a, c, g, or t
  misc_feature (1175)..(1175): n is a, c, g, or t
  misc_feature (1177)..(1177): n is a, c, g, or t
  misc_feature (1179)..(1179): n is a, c, g, or t
  misc_feature (1186)..(1186): n is a, c, g, or t
  misc_feature (1188)..(1188): n is a, c, g, or t
  misc_feature (1198)..(1198): n is a, c, g, or t
  misc_feature (1207)..(1207): n is a, c, g, or t
  misc_feature (1214)..(1214): n is a, c, g, or t
  misc_feature (1227)..(1228): n is a, c, g, or t
  misc_feature (1232)..(1232): n is a, c, g, or t
  misc_feature (1236)..(1236): n is a, c, g, or t
  misc_feature (1246)..(1246): n is a, c, g, or t
  misc_feature (1249)..(1250): n is a, c, g, or t
  misc_feature (1254)..(1256): n is a, c, g, or t
  misc_feature (1260)..(1261): n is a, c, g, or t
  misc_feature (1263)..(1263): n is a, c, g, or t
  misc_feature (1269)..(1269): n is a, c, g, or t
  misc_feature (1273)..(1273): n is a, c, g, or t
  misc_feature (1276)..(1276): n is a, c, g, or t
  misc_feature (1284)..(1284): n is a, c, g, or t
  misc_feature (1289)..(1293): n is a, c, g, or t
  misc_feature (1296)..(1297): n is a, c, g, or t
  misc_feature (1299)..(1299): n is a, c, g, or t
  misc_feature (1302)..(1303): n is a, c, g, or t
  misc_feature (1305)..(1305): n is a, c, g, or t
  misc_feature (1308)..(1308): n is a, c, g, or t
  misc_feature (1328)..(1329): n is a, c, g, or t
  misc_feature (1336)..(1336): n is a, c, g, or t
  misc_feature (1347)..(1347): n is a, c, g, or t
  misc_feature (1360)..(1360): n is a, c, g, or t
  misc_feature (1365)..(1365): n is a, c, g, or t
  misc_feature (1371)..(1372): n is a, c, g, or t
  misc_feature (1379)..(1380): n is a, c, g, or t
  misc_feature (1385)..(1385): n is a, c, g, or t
  misc_feature (1395)..(1395): n is a, c, g, or t
  misc_feature (1397)..(1397): n is a, c, g, or t
  misc_feature (1400)..(1400): n is a, c, g, or t
  misc_feature (1406)..(1406): n is a, c, g, or t
  misc_feature (1413)..(1413): n is a, c, g, or t
  misc_feature (1416)..(1416): n is a, c, g, or t
  misc_feature (1423)..(1423): n is a, c, g, or t
  misc_feature (1430)..(1430): n is a, c, g, or t
  misc_feature (1441)..(1441): n is a, c, g, or t
  misc_feature (1444)..(1445): n is a, c, g, or t
  misc_feature (1447)..(1447): n is a, c, g, or t
  misc_feature (1453)..(1454): n is a, c, g, or t
  misc_feature (1463)..(1463): n is a, c, g, or t
gaatagagagattactatgagaggatcgcatcaccatcaccatcacggatcctatttaggtgacactatagaatcgtcgacccacgcgtccgggtttggttgtgagatcgagaataacagaagcagcggagcattctggaaatattactatgatggaaaggactacattgaattcaacaaagaaatcccagcctgggtccccttcgacccagcagcccagataaccaagcanaagtgggaggcagaaccagtctacgtgcagcgggccaaggcttacctggaggaggagtgccctgcgactctgcggaaatacctgaaatacagcaaaaatatcctggaccggcaagatcctccctctgtggtggtcaccagccaccaggccccaggagaaaagaagaaactgaagtgcctggcctacgacttctacccagggaaaattgatgtgcactggactcgggccggcgaggtgcaggancctgagttacggggagatgttcttcacaatggaaatggcacttaccagtcctgggtggtggtggcagtgcccccgcangacacagccccctactcctgccacgtgcagcacagcagcctgncccagcccctcntggtgccctgggaggccagctaggaancaagggttggaggnaatgtggnatctcaaacccagtaagctgcccttcctgcctgatgtgggagctgaaccacagaaatncacatgtcaatgganccacnaggccctgaagnagcantgtgggggggacnnaacaggaggttgnatttggannaccgaaagactgggatgcctgtcttgaagtataacttgnnacccaaaaaaaatcntntcacccttgagccccncccccaccccccttggtctantctngtnagaagctaannaaaataanncnnnccctcctttccctaancaanaaaaatgantaatanactaaaannttattttctactnagggcnggccccccnnccatnaaggagtccncaatnanatcttaantcaccttnatctttgncaccctgtnnaaaaaanncncnaaattgactcncnaacctccnttncgaattgttttnaaanactctcgttnngccccggcgtnnatttttttttgnngaaaaacnccnnttanncttggncaaantttttcganantnananancntaatatnanataaaaatcnccggttaanacccccntttaatttctccnngtgntccncaaaaaaatnttnntatnnntttnncntttcgntcanggncccatatngccannnnnctnncntgnnanttnccctcttttagaccctaaannaatatcncaagttttttntcgcccttttcanttctncccacnnataatcnnccccnatttctatgnanatnaaaacngaatcantgnaccaaantatcctntcttacctctntannanaataanntcttctccn

SEQ ID NO: 202 - DNA, 831 bp, Homo Sapiens
  misc_feature (699)..(699): n is a, c, g, or t
  misc_feature (725)..(725): n is a, c, g, or t
  misc_feature (745)..(745): n is a, c, g, or t
  misc_feature (757)..(757): n is a, c, g, or t
  misc_feature (767)..(767): n is a, c, g, or t
  misc_feature (775)..(775): n is a, c, g, or t
  misc_feature (780)..(780): n is a, c, g, or t
  misc_feature (790)..(790): n is a, c, g, or t
  misc_feature (819)..(819): n is a, c, g, or t
  misc_feature (821)..(821): n is a, c, g, or t
  misc_feature (826)..(826): n is a, c, g, or t
gagaggatcgcatcaccatcaccatcacggatcctatttaggtgacactatagaatcgtcgacccacgcgtccggcactcctgaaccggataccagcactgtaccccaggatgctgccaccatccccagctcagccatgcaggccccaacagtttgtatctacttgaacaagaatggcagcacaggcccccacttagataagaagaaggtccagcaactccctgaccattttggaccagcccgtgcctctgtggtgttgcagcaggctgtccaggcctgtatcgactgtgcttatcaccagaaaaccgtcttcagcttcctcaagcaaggccatggtggtgaggttatctcagccgtgtttgaccgggaacagcataccctcaacctcccagcagtcaacagcatcacctacgtcctccgcttcctggagaaactctgccacaaccttcgtagtgacaatctgtttggcaaccagccctttacacagactcacttgtcactcactgccatagagtacagccacagccacgacaggtacctaccaggtgaaacctttgtcctggggaatagtctggcccgctccttggaaccacactcaaaactcaatggactctgcctcaaatcccaccaacccttgtcagcacctcccaaaggcaccggcccttgctttcatcctgtggcctcccacccaagcactgncctcagctgtgcgcaggctatgctcnaggggggtcggaacgatacntggagagccgcnatgcctctcngactgagngggcngggacccccncctcatggacagtcgaggattgtgaatgnantttgnccggg

SEQ ID NO: 203 - DNA, 1195 bp, Homo Sapiens
  misc_feature (843)..(843): n is a, c, g, or t
  misc_feature (863)..(863): n is a, c, g, or t
  misc_feature (875)..(875): n is a, c, g, or t
  misc_feature (913)..(913): n is a, c, g, or t
  misc_feature (925)..(925): n is a, c, g, or t
  misc_feature (930)..(930): n is a, c, g, or t
  misc_feature (934)..(934): n is a, c, g, or t
  misc_feature (965)..(965): n is a, c, g, or t
  misc_feature (968)..(968): n is a, c, g, or t
  misc_feature (983)..(983): n is a, c, g, or t
  misc_feature (989)..(989): n is a, c, g, or t
  misc_feature (1006)..(1006): n is a, c, g, or t
  misc_feature (1013)..(1013): n is a, c, g, or t
  misc_feature (1018)..(1019): n is a, c, g, or t
  misc_feature (1021)..(1021): n is a, c, g, or t
  misc_feature (1030)..(1030): n is a, c, g, or t
  misc_feature (1036)..(1036): n is a, c, g, or t
  misc_feature (1079)..(1079): n is a, c, g, or t
  misc_feature (1092)..(1092): n is a, c, g, or t
  misc_feature (1102)..(1102): n is a, c, g, or t
  misc_feature (1104)..(1104): n is a, c, g, or t
  misc_feature (1107)..(1107): n is a, c, g, or t
  misc_feature (1121)..(1121): n is a, c, g, or t
  misc_feature (1125)..(1125): n is a, c, g, or t
  misc_feature (1133)..(1133): n is a, c, g, or t
  misc_feature (1136)..(1136): n is a, c, g, or t
  misc_feature (1138)..(1138): n is a, c, g, or t
  misc_feature (1144)..(1144): n is a, c, g, or t
  misc_feature (1148)..(1148): n is a, c, g, or t
  misc_feature (1154)..(1154): n is a, c, g, or t
  misc_feature (1158)..(1158): n is a, c, g, or t
  misc_feature (1165)..(1165): n is a, c, g, or t
  misc_feature (1171)..(1172): n is a, c, g, or t
  misc_feature (1179)..(1179): n is a, c, g, or t
  misc_feature (1193)..(1194): n is a, c, g, or t
tagagaaattactatgagaggatcgcatcaccatcaccatcacggatcctatttaggtgacactatagaatcgtcgacccacgcgtccgggttagaaggcacaggtggcgagatgagccgggtaccagcgttcctgagcgcggccgaggtggaggaacacctccgcagctccagcctcctcatcccgcctctagagacggccctggccaacttctccagcggtcccgaaggaggggtcatgcagcccgtgcgcaccgtggtgccggtgaccaagcacaggggctacctgggggtcatgcccgcctacagtgctgcagaggatgcactgaccaccaagttggtcaccttctacgaggaccgcggcatcacctcggtcgtcccttcccaccaggctactgtgctactctttgagcccagcaatggcaccctgctggcggtcatggatggaaatgtcataactgcaaagagaacagctgcagtttctgccattgccaccaagtttctgaaacctcccagcagtgaagtgctgtgcatccttggggctggggtccaggcctacagccattatgagatcttcacagagcagttctcctttaaggaggtgaggatatggaaccgcaccaaagaaaatgcagagaagtttgcagacacagtgcaaggagaggtacgggtctgttcttcggtccaggaggctgtggcaggtgcagatgtgatcatcacagtcaccctggcaacagagcccattttgtttggtgaatgggtgaagccaggggctcacatcaatgctgttggagccagcagacctgactggagagaactggatgatgagctcatgaaagaagntgtgctgtacgtggattccnaggaggctgccntgaaggagtctggaaatgtcctgctgtcagggcccganatttttgctganctggnaaantgattaaggaatgaaaccagcccactggganaanaccacggggtttaantctttnggaaatggcagtggaanaaaaaanttgcnncnaaactcatntatganttcctgggcatctgggaaaaaaaaaaaaaggaattttattttnaaatggaagcttnaaaaaaatgncngcnggttccaaaatttncaanaaaaaagnagnantccgtncccnggaaancccntttgggntttcanntttaccntaaaggggaaatcnnt

SEQ ID NO: 204 - DNA, 1370 bp, Homo Sapiens
  misc_feature (755)..(757): n is a, c, g, or t
  misc_feature (763)..(763): n is a, c, g, or t
  misc_feature (765)..(765): n is a, c, g, or t
  misc_feature (767)..(827): n is a, c, g, or t
  misc_feature (831)..(831): n is a, c, g, or t
  misc_feature (836)..(836): n is a, c, g, or t
  misc_feature (838)..(838): n is a, c, g, or t
  misc_feature (842)..(842): n is a, c, g, or t
  misc_feature (844)..(844): n is a, c, g, or t
  misc_feature (846)..(846): n is a, c, g, or t
  misc_feature (851)..(851): n is a, c, g, or t
  misc_feature (859)..(859): n is a, c, g, or t
  misc_feature (868)..(868): n is a, c, g, or t
  misc_feature (874)..(874): n is a, c, g, or t
  misc_feature (887)..(888): n is a, c, g, or t
  misc_feature (897)..(899): n is a, c, g, or t
  misc_feature (902)..(902): n is a, c, g, or t
  misc_feature (911)..(911): n is a, c, g, or t
  misc_feature (937)..(937): n is a, c, g, or t
  misc_feature (939)..(939): n is a, c, g, or t
  misc_feature (942)..(942): n is a, c, g, or t
  misc_feature (950)..(950): n is a, c, g, or t
  misc_feature (971)..(972): n is a, c, g, or t
  misc_feature (978)..(978): n is a, c, g, or t
  misc_feature (981)..(981): n is a, c, g, or t
  misc_feature (986)..(986): n is a, c, g, or t
  misc_feature (995)..(995): n is a, c, g, or t
  misc_feature (1001)..(1003): n is a, c, g, or t
  misc_feature (1006)..(1006): n is a, c, g, or t
  misc_feature (1008)..(1008): n is a, c, g, or t
  misc_feature (1029)..(1029): n is a, c, g, or t
  misc_feature (1034)..(1034): n is a, c, g, or t
  misc_feature (1037)..(1037): n is a, c, g, or t
  misc_feature (1039)..(1039): n is a, c, g, or t
  misc_feature (1041)..(1041): n is a, c, g, or t
  misc_feature (1047)..(1048): n is a, c, g, or t
  misc_feature (1051)..(1051): n is a, c, g, or t
  misc_feature (1057)..(1057): n is a, c, g, or t
  misc_feature (1062)..(1062): n is a, c, g, or t
  misc_feature (1065)..(1067): n is a, c, g, or t
  misc_feature (1070)..(1070): n is a, c, g, or t
  misc_feature (1084)..(1086): n is a, c, g, or t
  misc_feature (1093)..(1094): n is a, c, g, or t
  misc_feature (1097)..(1099): n is a, c, g, or t
  misc_feature (1101)..(1101): n is a, c, g, or t
  misc_feature (1103)..(1104): n is a, c, g, or t
  misc_feature (1106)..(1106): n is a, c, g, or t
  misc_feature (1108)..(1108): n is a, c, g, or t
  misc_feature (1117)..(1117): n is a, c, g, or t
  misc_feature (1122)..(1122): n is a, c, g, or t
  misc_feature (1124)..(1124): n is a, c, g, or t
  misc_feature (1129)..(1130): n is a, c, g, or t
  misc_feature (1138)..(1140): n is a, c, g, or t
  misc_feature (1143)..(1143): n is a, c, g, or t
  misc_feature (1148)..(1148): n is a, c, g, or t
  misc_feature (1155)..(1156): n is a, c, g, or t
  misc_feature (1167)..(1167): n is a, c, g, or t
  misc_feature (1171)..(1171): n is a, c, g, or t
  misc_feature (1177)..(1177): n is a, c, g, or t
  misc_feature (1179)..(1181): n is a, c, g, or t
  misc_feature (1187)..(1187): n is a, c, g, or t
  misc_feature (1200)..(1201): n is a, c, g, or t
  misc_feature (1206)..(1206): n is a, c, g, or t
  misc_feature (1209)..(1209): n is a, c, g, or t
  misc_feature (1213)..(1213): n is a, c, g, or t
  misc_feature (1216)..(1216): n is a, c, g, or t
  misc_feature (1220)..(1221): n is a, c, g, or t
  misc_feature (1231)..(1237): n is a, c, g, or t
  misc_feature (1239)..(1240): n is a, c, g, or t
  misc_feature (1243)..(1243): n is a, c, g, or t
  misc_feature (1245)..(1245): n is a, c, g, or t
  misc_feature (1249)..(1249): n is a, c, g, or t
  misc_feature (1251)..(1251): n is a, c, g, or t
  misc_feature (1259)..(1260): n is a, c, g, or t
  misc_feature (1262)..(1262): n is a, c, g, or t
  misc_feature (1268)..(1269): n is a, c, g, or t
  misc_feature (1283)..(1287): n is a, c, g, or t
  misc_feature (1290)..(1290): n is a, c, g, or t
  misc_feature (1295)..(1296): n is a, c, g, or t
  misc_feature (1301)..(1301): n is a, c, g, or t
  misc_feature (1303)..(1305): n is a, c, g, or t
  misc_feature (1307)..(1307): n is a, c, g, or t
  misc_feature (1311)..(1312): n is a, c, g, or t
  misc_feature (1318)..(1318): n is a, c, g, or t
  misc_feature (1320)..(1321): n is a, c, g, or t
  misc_feature (1327)..(1327): n is a, c, g, or t
  misc_feature (1331)..(1331): n is a, c, g, or t
  misc_feature (1335)..(1339): n is a, c, g, or t
  misc_feature (1342)..(1342): n is a, c, g, or t
  misc_feature (1344)..(1344): n is a, c, g, or t
  misc_feature (1346)..(1347): n is a, c, g, or t
  misc_feature (1349)..(1349): n is a, c, g, or t
  misc_feature (1354)..(1354): n is a, c, g, or t
  misc_feature (1359)..(1359): n is a, c, g, or t
  misc_feature (1366)..(1367): n is a, c, g, or t
  misc_feature (1370)..(1370): n is a, c, g, or t
tagagaaattactatgagaggatcgcatcaccatcaccatcacggatcctatttaggtgacactatagaatcgtcgacccacgcgtccgaccagctctctgctctcccagcgcagcgccgccgcccggcccctccagcttcccggaccatggccaacctggagcgcaccttcatcgccatcaagccggacggcgtgcagcgcggcctggtgggcgagatcatcaagcgcttcgagcagaagggattccgcctcgtggccatgaagttcctccgggcctctgaagaacacctgaagcagcactacattgacctgaaagaccgaccattcttccctgggctggtgaagtacatgaactcagggccggttgtggccatggtctgggaggggctgaacgtggtgaagacaggccgagtgatgcttggggagaccaatccagcagattcaaagccaggcaccattcgtggggacttctgcattcaggttggcaggaacatcattcatggcagtgattcagtaaaaagtgctgaaaaagaaatcagcctatggtttaagcctgaagaactggttgactacaagtcttgtgctcatgactgggtctatgaataagaggtggacacaacagcagtctccttcagcacggcgtggtgtgtccctggacacagctcttcattccattgacttagaggcaacaggattgatcattcttttatagagcatatttgccaataaagcttttggaagcctgaagaattannnaaaaananannnnnnnnnnnnnnnnnnnnnnnnnnnnnnnnnnnnnnnnnnnnnnnnnnnnnnnnnnnnngggnggccncncccnananggagncgaataancttaattanctgaanctggactcctttnnaaaaatccnnnaangaacctccnaaactcccttggattttttcaaaacncncgnttgccccnggggtttttttttggggaaannccaacnacnttggnaaatttttncgggannnaangnacctaaattgggaaaaaaaanccctnggnantncccccnnttnaaaatncccanggnnnccnaaaaaaaaattttnnngatttcnnccnnntncnnangnaccaaaaancaaancnttacnnggaattannnccnttttnaaaaccnnaaaaaaaaaanccantttttncnnncttttnaatttttcccccnnaaaanccncccnaantttnngaaaaaaaannnnnnngnnaangnaaantncccttttnncntttttnnaaaaaaaaattttnnnnnganaaaannaaaantnnngntttnnattttnanngggggngggnaaannnnnttncngnntnaaaanttttnccccccnngtn

SEQ ID NO: 205 - DNA, 861 bp, Homo Sapiens
tgagaggatcgcatcaccatcaccatcacggatcctatttaggtgacactatagaatcgtcgacccacgcgtccgggccaggccggagccggactacgggagccgaggcgggccgcgcggtgggcgcggagaggagcggagcggcgcggcaggccgggcgggtggcggcagcagcggaggaggccgcagctgcgggtccgaggagcggaggcgacgcgggcggcggcggggggccgggtggccggggtcccgggccccgcggcggcggcagcggcggcggcggcggcaggatgatcaagctgttctcgctgaagcagcagaagaaggaggaggagtcggcgggcggcaccaagggcagcagcaagaaggcgtcggcggcgcagctgcggatccagaaggacataaacgagctgaacctgcccaagacgtgtgatatcagcttctcagatccagacgacctcctcaacttcaagctggtcatctgtcctgatgagggcttctacaagagtgggaagtttgtgttcagttttaaggtgggccagggttacccgcatgatccccccaaggtgaagtgtgagacaatggtctatcaccccaacattgacctcgagggcaacgtctgcctcaacatcctcaggtgaggacactggccctctaatgccctcctcagcgctgcctgccaggcctccctcatggtcttgtgggcactacatcagactctgtcccttcccacccctttgttgtctgtggtttcttgatttcccagtcatcttcctcatggcctgaccttggttttctccttggcctgtcctgctccacaccctccctcccagcctctcacatgctcactctcctatgccc

SEQ ID NO: 206 - DNA, 1074 bp, Homo Sapiens
  misc_feature (537)..(537): n is a, c, g, or t
  misc_feature (688)..(688): n is a, c, g, or t
  misc_feature (696)..(696): n is a, c, g, or t
  misc_feature (698)..(698): n is a, c, g, or t
  misc_feature (719)..(719): n is a, c, g, or t
  misc_feature (727)..(727): n is a, c, g, or t
  misc_feature (734)..(734): n is a, c, g, or t
  misc_feature (743)..(743): n is a, c, g, or t
  misc_feature (765)..(765): n is a, c, g, or t
  misc_feature (784)..(784): n is a, c, g, or t
  misc_feature (786)..(786): n is a, c, g, or t
  misc_feature (794)..(794): n is a, c, g, or t
  misc_feature (796)..(796): n is a, c, g, or t
  misc_feature (809)..(810): n is a, c, g, or t
  misc_feature (814)..(816): n is a, c, g, or t
  misc_feature (821)..(821): n is a, c, g, or t
  misc_feature (825)..(826): n is a, c, g, or t
  misc_feature (828)..(828): n is a, c, g, or t
  misc_feature (830)..(831): n is a, c, g, or t
  misc_feature (833)..(834): n is a, c, g, or t
  misc_feature (840)..(841): n is a, c, g, or t
  misc_feature (844)..(844): n is a, c, g, or t
  misc_feature (849)..(850): n is a, c, g, or t
  misc_feature (854)..(854): n is a, c, g, or t
  misc_feature (858)..(861): n is a, c, g, or t
  misc_feature (863)..(865): n is a, c, g, or t
  misc_feature (867)..(871): n is a, c, g, or t
  misc_feature (873)..(873): n is a, c, g, or t
  misc_feature (882)..(882): n is a, c, g, or t
  misc_feature (884)..(884): n is a, c, g, or t
  misc_feature (886)..(893): n is a, c, g, or t
  misc_feature (895)..(896): n is a, c, g, or t
  misc_feature (898)..(900): n is a, c, g, or t
  misc_feature (909)..(909): n is a, c, g, or t
  misc_feature (912)..(916): n is a, c, g, or t
  misc_feature (920)..(921): n is a, c, g, or t
  misc_feature (925)..(925): n is a, c, g, or t
  misc_feature (927)..(927): n is a, c, g, or t
  misc_feature (929)..(930): n is a, c, g, or t
  misc_feature (932)..(933): n is a, c, g, or t
  misc_feature (936)..(939): n is a, c, g, or t
  misc_feature (941)..(949): n is a, c, g, or t
  misc_feature (951)..(951): n is a, c, g, or t
  misc_feature (953)..(955): n is a, c, g, or t
  misc_feature (961)..(967): n is a, c, g, or t
  misc_feature (969)..(970): n is a, c, g, or t
  misc_feature (972)..(979): n is a, c, g, or t
  misc_feature (981)..(984): n is a, c, g, or t
  misc_feature (994)..(999): n is a, c, g, or t
  misc_feature (1005)..(1007): n is a, c, g, or t
  misc_feature (1009)..(1024): n is a, c, g, or t
  misc_feature (1026)..(1031): n is a, c, g, or t
  misc_feature (1033)..(1033): n is a, c, g, or t
  misc_feature (1035)..(1037): n is a, c, g, or t
  misc_feature (1040)..(1054): n is a, c, g, or t
  misc_feature (1056)..(1060): n is a, c, g, or t
  misc_feature (1062)..(1062): n is a, c, g, or t
  misc_feature (1064)..(1074): n is a, c, g, or t
tactatgagaggatcgcatcaccatcaccatcacggatcctatttaggtgacactatagaatcgtcgacccacgcgtccgctctgagaagccggactacgcggcagcggctcttcaaagcggagccgggagtttttgctacagttttcgccaccatgagtcgcagctataatgatgagctgcagttcttggagaagatcaataaaaactgctggaggatcaagaagggcttcgtgcccaacatgcaggttgaaggtgttttctatgtgaatgatgctctggagaaattgatgtttgaggaattaaggaatgcctgtcgaggtggtggtgttggtggcttcctgccagccatgaaacagattggcaatgtggcagccctgcctggaattgttcatcgatctattgggcttcctgatgtccattcaggatatgggtttgctattgggaacatggcagcctttgatatgaatgaccctgaagcagtagtatccccaggtggtgtcgggtttgacatcaactgtggtgtccgcttgctaanaaccaatttagatgaaagtgatgtccagcctgtgaaggagcaacttgcccaagctatgtttgaccacattcctgttggggtggggtcaaaaggtgtcatcccaatgaatgccaaagacttggaggaggccttggagatgggggtggactgntccttaananaagggtatgcctgggctgaanacaaggancactgcnaggatacgnaaggatgctgcaagctgacccnaataaagtttctgcaaggncnaaaaaaanangcccttcccccanntggnnnacccntggnnancnngnnaacccnnttnttgcnnaaancccnnnntnnngnnnnnanaattttccnangnnnnnnnncnncnnnaaaaaaaanggnnnnntccnncccntnanngnnccnnnngnnnnnnnnnantnnncccccnnnnnnnanncnnnnnnnntnnnnccccccccannnnnncccccnnnannnnnnnnnnnnnnnntnnnnnnanannnccnnnnnnnnnnnnnnncnnnnntntnnnnnnnnnnn

SEQ ID NO: 207 - DNA, 1301 bp, Homo Sapiens
  misc_feature (861)..(861): n is a, c, g, or t
  misc_feature (916)..(916): n is a, c, g, or t
  misc_feature (935)..(935): n is a, c, g, or t
  misc_feature (966)..(969): n is a, c, g, or t
  misc_feature (972)..(1059): n is a, c, g, or t
  misc_feature (1061)..(1070): n is a, c, g, or t
  misc_feature (1080)..(1081): n is a, c, g, or t
  misc_feature (1089)..(1089): n is a, c, g, or t
  misc_feature (1095)..(1096): n is a, c, g, or t
  misc_feature (1098)..(1099): n is a, c, g, or t
  misc_feature (1104)..(1105): n is a, c, g, or t
  misc_feature (1107)..(1108): n is a, c, g, or t
  misc_feature (1111)..(1113): n is a, c, g, or t
  misc_feature (1116)..(1117): n is a, c, g, or t
  misc_feature (1120)..(1120): n is a, c, g, or t
  misc_feature (1125)..(1128): n is a, c, g, or t
  misc_feature (1133)..(1133): n is a, c, g, or t
  misc_feature (1137)..(1138): n is a, c, g, or t
  misc_feature (1140)..(1140): n is a, c, g, or t
  misc_feature (1147)..(1147): n is a, c, g, or t
  misc_feature (1156)..(1158): n is a, c, g, or t
  misc_feature (1171)..(1171): n is a, c, g, or t
  misc_feature (1175)..(1175): n is a, c, g, or t
  misc_feature (1179)..(1180): n is a, c, g, or t
  misc_feature (1193)..(1193): n is a, c, g, or t
  misc_feature (1197)..(1197): n is a, c, g, or t
  misc_feature (1204)..(1208): n is a, c, g, or t
  misc_feature (1210)..(1211): n is a, c, g, or t
  misc_feature (1213)..(1213): n is a, c, g, or t
  misc_feature (1217)..(1217): n is a, c, g, or t
  misc_feature (1221)..(1221): n is a, c, g, or t
  misc_feature (1224)..(1229): n is a, c, g, or t
  misc_feature (1231)..(1234): n is a, c, g, or t
  misc_feature (1236)..(1237): n is a, c, g, or t
  misc_feature (1247)..(1250): n is a, c, g, or t
  misc_feature (1253)..(1253): n is a, c, g, or t
  misc_feature (1256)..(1257): n is a, c, g, or t
  misc_feature (1264)..(1264): n is a, c, g, or t
  misc_feature (1266)..(1268): n is a, c, g, or t
  misc_feature (1272)..(1273): n is a, c, g, or t
  misc_feature (1277)..(1280): n is a, c, g, or t
  misc_feature (1301)..(1301): n is a, c, g, or t
attagagaaattactatgagaggatcgcatcaccatcaccatcacggatcctatttaggtgacactatagaatcgtcgacccacgcgtccgtgcaggctgtgagaaacgcggggtcgcggttcctgcggtcctggacttggccccagacagccggcagggtcgtggccagaacgccggccgggaccatctgcacaggcgctcgacagctccaagacgctgcggccaagcagaaagttgaacagaacgcggctcccagccacaccaagttcagcatttaccctcccattccaggagaggagagctctctgaggtgggcaggaaagaaatttgaggagatcccaattgcacacattaaagcatcccacaacaacacacagatccaggtagtctctgctagtaatgagccccttgcctttgcttcctgtggcacagagggatttcggaatgccaagaagggcacaggcatcgcagcacagacagcaggcatagccgcagcggcgagagctaaacaaaagggcgtgatccacatccgagttgtggtgaaaggcctggggccaggacgcttgtctgccatgcacggactgatcatgggcggcctggaagtgatctcaatcacagacaacaccccaatcccacacaacggctgccgccccaggaaggctcggaagctgtgatgggaaggaggcctgcacttggacctgacctcaagcctcagctccagtgggaccttgtaaaatgctccctgtcagagctctccagaatatgcttgttggagatccttcaggcagtaagggagagttttgcctccttacacagtggccttttgcttgcacctccagctggagatgggtgtgccccanaagtaagctttgcatctcttacaagaggggagctacaggggcagccgtggcctangcccaaactctgctctganaaaataaatatctgtaccacctgttaaattnnnnaannnnnnnnnnnnnnnnnnnnnnnnnnnnnnnnnnnnnnnnnnnnnnnnnnnnnnnnnnnnnnnnnnnnnnnnnnnnnnnnnnnnnnnnannnnnnnnnnaaaagggggnnccccccanaggggnncnnaaaanntnnttnnnaannggnccccnnnnaaaancccnnangcccccnaaccccccnnnttttttaaaaacntggnggcnncggggtttttttngggnaaacccnnnnntnngngatntttnggnnnnnnannnnannggaaaaaaannnnggnaannccccgtnannncccnngggnnnnaaaaaatttttgggttttttn

SEQ ID NO: 208 - DNA, 1210 bp, Homo Sapiens
  misc_feature (2)..(2): n is a, c, g, or t
  misc_feature (189)..(189): n is a, c, g, or t
  misc_feature (489)..(489): n is a, c, g, or t
  misc_feature (822)..(822): n is a, c, g, or t
  misc_feature (862)..(862): n is a, c, g, or t
  misc_feature (877)..(877): n is a, c, g, or t
  misc_feature (895)..(895): n is a, c, g, or t
  misc_feature (903)..(903): n is a, c, g, or t
  misc_feature (920)..(920): n is a, c, g, or t
  misc_feature (927)..(927): n is a, c, g, or t
  misc_feature (951)..(951): n is a, c, g, or t
  misc_feature (994)..(994): n is a, c, g, or t
  misc_feature (1003)..(1003): n is a, c, g, or t
  misc_feature (1005)..(1005): n is a, c, g, or t
  misc_feature (1040)..(1040): n is a, c, g, or t
  misc_feature (1054)..(1054): n is a, c, g, or t
  misc_feature (1063)..(1063): n is a, c, g, or t
  misc_feature (1067)..(1068): n is a, c, g, or t
  misc_feature (1071)..(1071): n is a, c, g, or t
  misc_feature (1074)..(1074): n is a, c, g, or t
  misc_feature (1076)..(1076): n is a, c, g, or t
  misc_feature (1087)..(1088): n is a, c, g, or t
  misc_feature (1090)..(1090): n is a, c, g, or t
  misc_feature (1099)..(1099): n is a, c, g, or t
  misc_feature (1110)..(1110): n is a, c, g, or t
  misc_feature (1112)..(1112): n is a, c, g, or t
  misc_feature (1115)..(1115): n is a, c, g, or t
  misc_feature (1121)..(1121): n is a, c, g, or t
  misc_feature (1125)..(1125): n is a, c, g, or t
  misc_feature (1132)..(1132): n is a, c, g, or t
  misc_feature (1137)..(1137): n is a, c, g, or t
  misc_feature (1146)..(1146): n is a, c, g, or t
  misc_feature (1150)..(1150): n is a, c, g, or t
  misc_feature (1161)..(1161): n is a, c, g, or t
  misc_feature (1174)..(1174): n is a, c, g, or t
  misc_feature (1176)..(1176): n is a, c, g, or t
  misc_feature (1189)..(1189): n is a, c, g, or t
  misc_feature (1191)..(1191): n is a, c, g, or t
  misc_feature (1193)..(1193): n is a, c, g, or t
  misc_feature (1195)..(1195): n is a, c, g, or t
  misc_feature (1199)..(1200): n is a, c, g, or t
tnatagagaaattactatgagaggatcgcatcaccatcaccatcacggatcctatttaggtgacactatagaatcgtcgacccacgcgtccgcccacgcgtccgggtatgccaaacttgatgaggaagcagaaaacttggtggccacagtggtccctacccatctggcagctgctgtgcctgaggtggntgtttacctaaaggagtcagtggggaactccacgcgcattgactacggcacagggcatgaggcagccttcgctgctttcctctgctgtctctgcaagattggggtgctccgggtggatgaccaaatagctattgtcttcaaggtgttcaatcggtaccttgaggttatgcggaaactccagaaaacatacaggatggagccagccggcagccagggagtgtggggtctggatgacttccagtttctgcccttcatctggggcagttcgcagctgatagaccacccatacctggagcccanacactttgtggatgagaaggccgtgaatgagaaccacaaggactacatgttcctggagtgtatcctgtttattaccgagatgaagactggcccatttgcagagcactccaaccagctgtggaacatcagcgccgtcccttcctggtccaaagtgaaccagggtctcatccgcatgtataaggccgagtgcctggagaagttccctgtgatccagcacttcaagttcgggagcctgctgcccatccatcctgtcacgtcgggctaggaggggccaagccgaagagccacccaggccacagttcctgtgcctgccttccccaccccagcagtggnccctccccatcccctccctctgttcgtcccgtttgatganaggctggtttactgnggtggggtggcgagatgntctttganggggctcaaaacataangcttcanggcccaagttgggagaagtgaccnaaagtgtacccagttttctgagttcccgtgtgctaaactggcnaaaaaaaangntctggggcctggtcactcggccacttctctcctgnttctgggcttttcncccttcacncccnntcnagncnggttttaaaannangggctgttntgcaccccccnanggnaaggangganaaaaccngcggnttccattgntttncccttcggganccaagcctttctnangggtggaactgcncntncngggnnggtcattttc

SEQ ID NO: 209 - DNA, 1271 bp, Homo Sapiens
  misc_feature (15)..(15): n is a, c, g, or t
  misc_feature (842)..(842): n is a, c, g, or t
  misc_feature (851)..(851): n is a, c, g, or t
  misc_feature (867)..(867): n is a, c, g, or t
  misc_feature (909)..(909): n is a, c, g, or t
  misc_feature (917)..(917): n is a, c, g, or t
  misc_feature (922)..(922): n is a, c, g, or t
  misc_feature (939)..(939): n is a, c, g, or t
  misc_feature (961)..(961): n is a, c, g, or t
  misc_feature (964)..(964): n is a, c, g, or t
  misc_feature (970)..(972): n is a, c, g, or t
  misc_feature (979)..(979): n is a, c, g, or t
  misc_feature (986)..(986): n is a, c, g, or t
  misc_feature (993)..(993): n is a, c, g, or t
  misc_feature (1010)..(1010): n is a, c, g, or t
  misc_feature (1012)..(1012): n is a, c, g, or t
  misc_feature (1021)..(1022): n is a, c, g, or t
  misc_feature (1030)..(1030): n is a, c, g, or t
  misc_feature (1035)..(1035): n is a, c, g, or t
  misc_feature (1059)..(1059): n is a, c, g, or t
  misc_feature (1064)..(1064): n is a, c, g, or t
  misc_feature (1069)..(1069): n is a, c, g, or t
  misc_feature (1107)..(1107): n is a, c, g, or t
  misc_feature (1112)..(1113): n is a, c, g, or t
  misc_feature (1119)..(1121): n is a, c, g, or t
  misc_feature (1126)..(1126): n is a, c, g, or t
  misc_feature (1143)..(1143): n is a, c, g, or t
  misc_feature (1145)..(1145): n is a, c, g, or t
  misc_feature (1147)..(1147): n is a, c, g, or t
  misc_feature (1155)..(1155): n is a, c, g, or t
  misc_feature (1159)..(1159): n is a, c, g, or t
  misc_feature (1184)..(1186): n is a, c, g, or t
  misc_feature (1196)..(1196): n is a, c, g, or t
  misc_feature (1203)..(1203): n is a, c, g, or t
  misc_feature (1222)..(1222): n is a, c, g, or t
  misc_feature (1224)..(1224): n is a, c, g, or t
  misc_feature (1230)..(1230): n is a, c, g, or t
  misc_feature (1233)..(1234): n is a, c, g, or t
  misc_feature (1239)..(1239): n is a, c, g, or t
  misc_feature (1242)..(1243): n is a, c, g, or t
  misc_feature (1250)..(1250): n is a, c, g, or t
  misc_feature (1253)..(1253): n is a, c, g, or t
  misc_feature (1262)..(1262): n is a, c, g, or t
  misc_feature (1268)..(1268): n is a, c, g, or t
agagaaaaattactnatgagaggatcgcatcaccatcaccatcacggatcctatttagggtgacactatagaatcggtcgacccacgcgtccggtcgccgctgcatgggcgatgccggtgcctccgactggtttgacagccactttgacggtaacatttcccccgtctggacccgagagaacatggatcttccaccggacgtccagaggtggtggatgatgctgcagccccagttcaagtcacacaacaccaatgaggtgctggagaagctgttccagatagtgcctggcgagaacccctaccgcttccgggacccccaccagtgccggcgctgtgccgtggtggggaactcgggcaacctgcggggctctggctatgggcaggacgtggacgggcacaacttcatcatgaggatgaatcaggcgccaaccgtgggctttgagcaggatgttggcagccgaaccacccaccatttcatgtaccctgagagtgccaagaacctgcccgccaacgtcagcttcgtgctggtgcccttcaaggtcctggaccttctgtggatcgccagcgccttgtccacggggcagatccgattcacctacgccccagtgaagtccttccttcgagtggataaagaaaaggtccagatctacaacccagccttcttcaagtatatccacgacaggtggacagagcatcacgggcggtacccttccacggggatgctggtgcttttctttgccctgcatgtgtgtgatgaggtgaacgtgtacgggttcggggccgacagccggggcaactggcaccactactgggagaacaaccggtacgcgggcgagttccgnaagactggngtgcacgacgcggaanttcgaggcccacatcatcgacatgctggccaaggccaacaanatcgaaantctancgggggcaactgaaccngggcctcgccgcgaacctttcnggncccatnnntcggganccggggnctccggnccgggaaccaaggaacnancaaccccgnnaccaatcntgttncaacccaaggggcggtttgctgtngcccnccaantccagaaaatgggggaaacggccgggccttggaacaanttggnnttgggnnnggggnaaatttttgtttttccnancnaatctttngatncaagaaaatttcggggggtggtcannncccccaaaanggccttngggggggccaggccccccncnaagggnagnnaaaanctnnttatganctngacccgttnaaaacnaaa

SEQ ID NO: 210 - DNA, 1223 bp, Homo Sapiens
  misc_feature (875)..(875): n is a, c, g, or t
  misc_feature (904)..(904): n is a, c, g, or t
  misc_feature (907)..(907): n is a, c, g, or t
  misc_feature (947)..(947): n is a, c, g, or t
  misc_feature (968)..(968): n is a, c, g, or t
  misc_feature (971)..(971): n is a, c, g, or t
  misc_feature (983)..(983): n is a, c, g, or t
  misc_feature (994)..(994): n is a, c, g, or t
  misc_feature (1013)..(1013): n is a, c, g, or t
  misc_feature (1015)..(1015): n is a, c, g, or t
  misc_feature (1020)..(1020): n is a, c, g, or t
  misc_feature (1027)..(1027): n is a, c, g, or t
  misc_feature (1029)..(1029): n is a, c, g, or t
  misc_feature (1041)..(1041): n is a, c, g, or t
  misc_feature (1064)..(1064): n is a, c, g, or t
  misc_feature (1079)..(1079): n is a, c, g, or t
  misc_feature (1081)..(1081): n is a, c, g, or t
  misc_feature (1089)..(1089): n is a, c, g, or t
  misc_feature (1103)..(1103): n is a, c, g, or t
  misc_feature (1112)..(1112): n is a, c, g, or t
  misc_feature (1117)..(1117): n is a, c, g, or t
  misc_feature (1120)..(1120): n is a, c, g, or t
  misc_feature (1125)..(1125): n is a, c, g, or t
  misc_feature (1130)..(1130): n is a, c, g, or t
  misc_feature (1135)..(1135): n is a, c, g, or t
  misc_feature (1137)..(1137): n is a, c, g, or t
  misc_feature (1144)..(1145): n is a, c, g, or t
  misc_feature (1150)..(1152): n is a, c, g, or t
  misc_feature (1154)..(1154): n is a, c, g, or t
  misc_feature (1164)..(1164): n is a, c, g, or t
  misc_feature (1168)..(1168): n is a, c, g, or t
  misc_feature (1170)..(1170): n is a, c, g, or t
  misc_feature (1176)..(1176): n is a, c, g, or t
  misc_feature (1188)..(1188): n is a, c, g, or t
  misc_feature (1208)..(1208): n is a, c, g, or t
  misc_feature (1214)..(1214): n is a, c, g, or t
  misc_feature (1220)..(1220): n is a, c, g, or t
tagagaaattactatgagaggatcgcatcaccatcaccatcacggatcctatttaggtgacactatagaatcgtcgacccacgcgtccgtcttgctagattctcaggggctgctagattcatccctgatggcatcaggcactgccagccgctcagaggatgaggagtcactggcagggcagaagcgagcctcctcccaggccttgggcaccatccctaaacggagaagctcctccaggttcatcaagaggaagaagttcgatgatgagctggtggagagcagcctggcaaaatcttctacccgggcaaagggggccagtggggtggaaccagggcgctgttcggggagtgaaccctcctccagtgagaagaagaaggtatccaaagcccccagcactcctgtgccacccagcccagccccagcccctggactcaccaagcgtgtgaagaagagtaaacagccacttcaggtgaccaaggatctgggccgctggaagcctgcagatgacctcctgctcataaatgctgtgttgcagaccaacgacctgacctccgtccacctgggcgtgaaattcagctgccgcttcacccttcgggaggtccaggagcgttggtacgccctgctctacgatcctgtcatctccaagttggcctgtcaggccatgaggcagctgcacccagaggctattgcagccatccagagcaaggccctgtttagcaaggctgaggagcagctgctgagcaaagtgggatcgaccagccagcccaccttggagaccttccaggacctgctgcacagacaccctgatgccttctacctggcccgtaccgcgaaggccctgcaggcccactggcagctcatgaagcagtattacntgctggaggaaccagacagccgctgcccnaangggaccaagtgctgaacttctctgatgcaaagaactgatngatgacagtaactcaaggacntgngaaatgaggtcntggaacatganctgatgtggctgaacggcncnaaaancgaaaantncggcactggaanaaggaactgcttaatggcagggnttatggaagctttcnanggattaanttttcggaattcanaacaaactngcatnttncgggnccccnggggngnacctganngcccnnngngaaaatcccngggnanacaccnggatacccaatngtttggacttttttggaggnccggcntgaaanttc

SEQ ID NO: 211 - DNA, 1215 bp, Homo Sapiens
  misc_feature (1)..(1): n is a, c, g, or t
  misc_feature (908)..(908): n is a, c, g, or t
  misc_feature (921)..(921): n is a, c, g, or t
  misc_feature (1022)..(1022): n is a, c, g, or t
  misc_feature (1024)..(1024): n is a, c, g, or t
  misc_feature (1041)..(1041): n is a, c, g, or t
  misc_feature (1050)..(1050): n is a, c, g, or t
  misc_feature (1067)..(1067): n is a, c, g, or t
  misc_feature (1075)..(1075): n is a, c, g, or t
  misc_feature (1077)..(1077): n is a, c, g, or t
  misc_feature (1087)..(1087): n is a, c, g, or t
  misc_feature (1096)..(1096): n is a, c, g, or t
  misc_feature (1102)..(1102): n is a, c, g, or t
  misc_feature (1106)..(1107): n is a, c, g, or t
  misc_feature (1118)..(1118): n is a, c, g, or t
  misc_feature (1126)..(1126): n is a, c, g, or t
  misc_feature (1128)..(1129): n is a, c, g, or t
  misc_feature (1149)..(1149): n is a, c, g, or t
  misc_feature (1156)..(1156): n is a, c, g, or t
  misc_feature (1164)..(1164): n is a, c, g, or t
  misc_feature (1166)..(1166): n is a, c, g, or t
  misc_feature (1168)..(1169): n is a, c, g, or t
  misc_feature (1176)..(1176): n is a, c, g, or t
  misc_feature (1183)..(1183): n is a, c, g, or t
  misc_feature (1189)..(1189): n is a, c, g, or t
  misc_feature (1193)..(1193): n is a, c, g, or t
  misc_feature (1195)..(1195): n is a, c, g, or t
  misc_feature (1199)..(1199): n is a, c, g, or t
  misc_feature (1203)..(1203): n is a, c, g, or t
  misc_feature (1213)..(1213): n is a, c, g, or t
naatagagaaattactatgagaggatcgcatcaccatcaccatcacggatcctatttaggtgacactatagaatcgtcgacccacgcgtccgcccacgcgtccgagccaggttggcagctgacgggacagccggggtctattttgttgcgggttttcagcaaatccagggctggtctggaggcgcgaaaacttaaggcatacagaacgatggagtatatggcagaatccaccgaccgcagccctggacacatcttgtgctgtgagtgtggtgttccgataagtccaaatcctgccaatatttgtgtggcctgtttgcgaagtaaagtggacatcagccaaggtattccgaaacaagtctcgatttcgttctgcaaacaatgtcaaaggtattttcaaccaccaggaacttggatacagtgtgctttagaatccagggaacttcttgctttgtgcttgaaaaaaatcaaagcccctctgagtaaggtacggcttgtagatgcaggctttgtttggactgagcctcattctaagagacttaaagttaaactgactattcagaaagaggtgatgaatggtgctatccttcaacaagtgtttgtggtggattatgttgttcagtcccaaatgtgtggagattgccatagagtagaagctaaggatttctggaaggctgtgattcaagtgaggcaaaagactttgcataaaaaaactttctactatctggaacagttaattctgaaatatggaatgcatcagaatacacttcgtatcaaagagattcatgatggtctggatttttattattcctcaaaacaacatgctcagaagatggtcgaatttcttcagtgtacagttccctgtagatacaaagcatcacaaagactgatctctcagatatccatagtanccatacaattacnaaagcactttttctgtggaaattgttccaatatgcaaggaaatgttgtctgtctgtctccaaactggcacaaagcctgggaaaaatgaaccaaatttgtgngngtatccaagtaaccagnggccattcncctcattgatccaaacnccctacangnggcaaaaatngagggagcnctttcnggannccccctttcanagtttatncnncccaacccctaaggaatttnttggganggatggcncnannccaaaanaaaacgnggtgcngggntngaanggantcaaaaaacncc

SEQ ID NO: 212 - DNA, 1235 bp, Homo Sapiens
  misc_feature (936)..(936): n is a, c, g, or t
  misc_feature (1005)..(1005): n is a, c, g, or t
  misc_feature (1041)..(1041): n is a, c, g, or t
  misc_feature (1068)..(1068): n is a, c, g, or t
  misc_feature (1082)..(1082): n is a, c, g, or t
  misc_feature (1098)..(1098): n is a, c, g, or t
  misc_feature (1103)..(1103): n is a, c, g, or t
  misc_feature (1112)..(1112): n is a, c, g, or t
  misc_feature (1120)..(1120): n is a, c, g, or t
  misc_feature (1125)..(1125): n is a, c, g, or t
  misc_feature (1131)..(1132): n is a, c, g, or t
  misc_feature (1137)..(1138): n is a, c, g, or t
  misc_feature (1149)..(1149): n is a, c, g, or t
  misc_feature (1156)..(1156): n is a, c, g, or t
  misc_feature (1165)..(1165): n is a, c, g, or t
  misc_feature (1171)..(1171): n is a, c, g, or t
  misc_feature (1176)..(1176): n is a, c, g, or t
  misc_feature (1180)..(1180): n is a, c, g, or t
  misc_feature (1184)..(1184): n is a, c, g, or t
  misc_feature (1189)..(1190): n is a, c, g, or t
  misc_feature (1198)..(1199): n is a, c, g, or t
  misc_feature (1209)..(1209): n is a, c, g, or t
  misc_feature (1222)..(1222): n is a, c, g, or t
  misc_feature (1226)..(1226): n is a, c, g, or t
  misc_feature (1228)..(1230): n is a, c, g, or t
tagagaaattactatgagaggatcgcatcaccatcaccatcacggatcctatttaggtgacactatagaatcgtcgacccacgcgtccgcgccgcccaagatgccgaaaggaaagaaggccaagggaaagaaggtggctccggccccagctgtcgtgaagaagcaggaggctaagaaagtggtgaatcccctgtttgagaaaaggcctaagaattttggcattggacaggacatccagcccaaaagagacctcacccgctttgtgaaatggccccgctatatcaggttgcagcggcagagagccatcctctataagcggctgaaagtgcctcctgcgattaaccagttcacccaggccctggaccgccaaacagctactcagctgcttaagctggcccacaagtacagaccagagacaaagcaagagaagaagcagagactgttggcccgggccgagaagaaggctgctggcaaaggggacgtcccaacgaagagaccacctgtccttcgagcaggagttaacaccgtcaccaccttggtggagaacaagaaagctcagctggtggtgattgcacacgacgtggatcccatcgagctggttgtcttcttgcctgccctgtgtcgtaaaatgggggtcccttactgcattatcaagggaaaggcaagactgggacgtctagtccacaggaagacctgcaccactgtcgccttcacacaggtgaactcggaagacaaaggcgctttggctaagctggtggaagctatcaggaccaattacaatgacagatacgatgagatccgccgtcactggggtggcaatgtcctgggtcctaagtctgtggctcgtatcgccaagctcgaaaaggcaaaggctaaagaacttgccactaaactgggttaaatgtacactgttgagttttctgtacataaaaatanttgaaataatacaaattttccttcaaaaaaaaaaaaaaggggggccgccgcaaccatgaccgtggagtncgaggaggcgtcaaggactccccgcgcttcagggcnacattgacaaagtggaaacggacttgntggaaattgagccnaactggaaacctggtnaactntgcatggcntggggaancggtnagcctnntcacnncacaggttttntgagggntcccgactntccaanatgcngggnaccnttttnngaattttnnaagttcttancctagaaggggantccntnnnctttg

SEQ ID NO: 213 - DNA, 960 bp, Homo Sapiens
tgagaggatcgcatcaccatcaccatcacggatcctatttaggtgacactatagaatcgtcgacccacgcgtccgcagcagccgggctgagaggagcgtggctgtctcctctctccgccatggcgtgtgctcgcccactgatatcggtgtactccgaaaagggggagtcatctggcaaaaatgtcactttgcctgctgtattcaaggctcctattcgaccagatattgtgaactttgttcacaccaacttgcgcaaaaacaacagacagccctatgctgtcagtgaattagcaggtcatcagactagtgctgagtcttggggtactggcagagctgtggctcgaattcccagagttcgaggtggtgggactcaccgctctggccagggtgcttttggaaacatgtgtcgtggaggccgaatgtttgcaccaaccaaaacctggcgccgttggcatcgtagagtgaacacaacccaaaaacgatacgccatctgttctgccctggctgcctcagccctaccagcactggtcatgtctaaaggtcatcgtattgaggaagttcctgaacttcctttggtagttgaagataaagttgaaggctacaagaagaccaaggaagctgttttgctccttaagaaacttaaagcctggaatgatatcaaaaaggtctatgcctctcagcgaatgagagctggcaaaggcaaaatgagaaaccgtcgccgtatccagcgcaggggcccgtgcatcatctataatgaggataatggtatcatcaaggccttcagaaacatccctggaattactctgcttaatgtaagcaagctgaacattttgaagcttgctcctggtgggcatgtgggacgtttctgcatttggactgaaagtgctttccggaagttagatgaatttgtacggcacttggcgtaaagccgcttccctcaagagtaactacaatcttccc

SEQ ID NO: 214 - DNA, 811 bp, Homo Sapiens
  misc_feature (4)..(4): n is a, c, g, or t
  misc_feature (574)..(574): n is a, c, g, or t
  misc_feature (616)..(617): n is a, c, g, or t
  misc_feature (623)..(623): n is a, c, g, or t
  misc_feature (629)..(629): n is a, c, g, or t
  misc_feature (633)..(633): n is a, c, g, or t
  misc_feature (642)..(642): n is a, c, g, or t
  misc_feature (651)..(651): n is a, c, g, or t
  misc_feature (654)..(654): n is a, c, g, or t
  misc_feature (656)..(656): n is a, c, g, or t
  misc_feature (658)..(658): n is a, c, g, or t
  misc_feature (662)..(662): n is a, c, g, or t
  misc_feature (669)..(669): n is a, c, g, or t
  misc_feature (673)..(673): n is a, c, g, or t
  misc_feature (676)..(676): n is a, c, g, or t
  misc_feature (683)..(683): n is a, c, g, or t
  misc_feature (685)..(685): n is a, c, g, or t
  misc_feature (687)..(688): n is a, c, g, or t
  misc_feature (712)..(712): n is a, c, g, or t
  misc_feature (717)..(717): n is a, c, g, or t
  misc_feature (719)..(719): n is a, c, g, or t
  misc_feature (724)..(724): n is a, c, g, or t
  misc_feature (732)..(732): n is a, c, g, or t
  misc_feature (746)..(748): n is a, c, g, or t
  misc_feature (752)..(752): n is a, c, g, or t
  misc_feature (768)..(768): n is a, c, g, or t
  misc_feature (773)..(773): n is a, c, g, or t
  misc_feature (776)..(776): n is a, c, g, or t
  misc_feature (781)..(781): n is a, c, g, or t
  misc_feature (783)..(783): n is a, c, g, or t
  misc_feature (786)..(786): n is a, c, g, or t
  misc_feature (791)..(791): n is a, c, g, or t
  misc_feature (794)..(794): n is a, c, g, or t
  misc_feature (797)..(797): n is a, c, g, or t
  misc_feature (802)..(802): n is a, c, g, or t
  misc_feature (807)..(808): n is a, c, g, or t
  misc_feature (811)..(811): n is a, c, g, or t
taanaggagaattaactatgagaggatcgcatcaccatcaccatcacggatcctatttaggtgacactatagaatcgtcgacccacgcgtccgcggcggtccccacggcccccgcgcccgctccgacggcgacctcggctccagtcaagcccggcccggctctcagctacccgcaggaggaggccaccctcaatgagatgttccgcgaggttgaggaactgatggaggacacgcagcacaaattgcgcagcgcggtggaagagatggaggcagaagaagctgctgctaaagcatcatcagaagtgaacctggcaaacttacctcccagctatcacaatgagaccaacacagacacgaaggttggaaataataccatccatgtgcaccgagaaattcacaagataaccaacaaccagactggacaaatggtcttttcagagacagttatcacatctgtgggagacgaagaaggcagaaggagccacgagtgcatcatcgacgaggactgtgggcccagcatgtactgccagtttgccagcttccagtacacctgccagccatgccggggccagangatgctctgccacccgggaacagtgagtgctgtggaaaaccnnctgggngttctngggntccctgccnccaaatggnccncnangggncaacaangggnacnttttggnananncaaagggaattgcccccccggggnttgtngntgggnccttcccnaaaaaggccctggnnntttnccccgggggggaaccnccccnttnccccngnggnggggnagnatnttttntcccnnttn

SEQ ID NO: 215 - DNA, 919 bp, Homo Sapiens
  misc_feature (17)..(18): n is a, c, g, or t
  misc_feature (68)..(68): n is a, c, g, or t
  misc_feature (78)..(78): n is a, c, g, or t
  misc_feature (164)..(164): n is a, c, g, or t
  misc_feature (172)..(172): n is a, c, g, or t
  misc_feature (186)..(186): n is a, c, g, or t
  misc_feature (251)..(251): n is a, c, g, or t
  misc_feature (254)..(254): n is a, c, g, or t
  misc_feature (315)..(315): n is a, c, g, or t
  misc_feature (327)..(327): n is a, c, g, or t
  misc_feature (503)..(503): n is a, c, g, or t
  misc_feature (513)..(513): n is a, c, g, or t
  misc_feature (521)..(521): n is a, c, g, or t
  misc_feature (559)..(559): n is a, c, g, or t
  misc_feature (575)..(575): n is a, c, g, or t
  misc_feature (591)..(591): n is a, c, g, or t
  misc_feature (649)..(649): n is a, c, g, or t
  misc_feature (715)..(715): n is a, c, g, or t
  misc_feature (717)..(717): n is a, c, g, or t
  misc_feature (723)..(723): n is a, c, g, or t
  misc_feature (725)..(725): n is a, c, g, or t
  misc_feature (732)..(732): n is a, c, g, or t
  misc_feature (734)..(734): n is a, c, g, or t
  misc_feature (740)..(740): n is a, c, g, or t
  misc_feature (749)..(749): n is a, c, g, or t
  misc_feature (760)..(760): n is a, c, g, or t
  misc_feature (762)..(762): n is a, c, g, or t
  misc_feature (769)..(769): n is a, c, g, or t
  misc_feature (798)..(798): n is a, c, g, or t
  misc_feature (803)..(803): n is a, c, g, or t
  misc_feature (815)..(815): n is a, c, g, or t
  misc_feature (819)..(819): n is a, c, g, or t
  misc_feature (828)..(828): n is a, c, g, or t
  misc_feature (830)..(830): n is a, c, g, or t
  misc_feature (832)..(832): n is a, c, g, or t
  misc_feature (842)..(842): n is a, c, g, or t
  misc_feature (844)..(844): n is a, c, g, or t
  misc_feature (865)..(865): n is a, c, g, or t
  misc_feature (876)..(876): n is a, c, g, or t
  misc_feature (907)..(907): n is a, c, g, or t
ttcattaaagcggagannttactatgagaggatcgcatcaccatcaccatcacggatcctatttaggngacactatanaatcgtcgacccacgcgtccgggggtttattgattgaattccgccggcgcgggagcctctgcagagagagagcgcgagagatgganatgggcanacggattcatttanagctgcggaacaggacgccctctgatgtgaaagaacttgtcctggacaacagtcggtcgaatganggnaaactcgaaggcctcacagatgaatttgaagaactggaattcttaagtacaatcaacgtangcctcacctcantcgcaaacttaccaaagttaaacaaacttaagaagcttgaactaagcgataacagagtctcagggggcctggaagtattggcagaaaagtgtccgaacctcacgcatctaaatttaagtggcaacaaaattaaagacctcagcacaatagagccactgaaaaagttagaaaacctnaagagcttanaccttttnaattgcgaggtaaccaacctgaacgactaccgagaaantgggttcaagctcctnccgcaactcacatatntggacggctatgaccgggacgacaaggaggcccctgactcggatgctgagggctacgnggagggcctggatgatgaggaggacgatgaggatgatgaggactatgatgaaaatgctcaggtagngnaaaacnangaggacnangatgangaggagganggtgaaaaggngnaccttgncttggaaaagaaggaggaggatgaaaaanggttntaccgatggaanggtngttgaccangnanatgaaaaaancntggtgaaaaaaaaaggggtcngaaccgaaacnaaaaccctggagatggggggaaaaaggatgnctaaggggaaat

SEQ ID NO: 216 - DNA, 1341 bp, Homo Sapiens
  misc_feature (1006)..(1006): n is a, c, g, or t
  misc_feature (1043)..(1043): n is a, c, g, or t
  misc_feature (1069)..(1069): n is a, c, g, or t
  misc_feature (1085)..(1085): n is a, c, g, or t
  misc_feature (1088)..(1088): n is a, c, g, or t
  misc_feature (1098)..(1098): n is a, c, g, or t
  misc_feature (1103)..(1103): n is a, c, g, or t
  misc_feature (1112)..(1112): n is a, c, g, or t
  misc_feature (1116)..(1116): n is a, c, g, or t
  misc_feature (1118)..(1118): n is a, c, g, or t
  misc_feature (1121)..(1121): n is a, c, g, or t
  misc_feature (1127)..(1127): n is a, c, g, or t
  misc_feature (1136)..(1136): n is a, c, g, or t
  misc_feature (1140)..(1140): n is a, c, g, or t
  misc_feature (1142)..(1142): n is a, c, g, or t
  misc_feature (1152)..(1152): n is a, c, g, or t
  misc_feature (1161)..(1161): n is a, c, g, or t
  misc_feature (1164)..(1164): n is a, c, g, or t
  misc_feature (1172)..(1173): n is a, c, g, or t
  misc_feature (1184)..(1184): n is a, c, g, or t
  misc_feature (1191)..(1191): n is a, c, g, or t
  misc_feature (1194)..(1194): n is a, c, g, or t
  misc_feature (1198)..(1198): n is a, c, g, or t
  misc_feature (1200)..(1200): n is a, c, g, or t
  misc_feature (1205)..(1205): n is a, c, g, or t
  misc_feature (1211)..(1211): n is a, c, g, or t
  misc_feature (1215)..(1215): n is a, c, g, or t
  misc_feature (1218)..(1218): n is a, c, g, or t
  misc_feature (1220)..(1220): n is a, c, g, or t
  misc_feature (1222)..(1222): n is a, c, g, or t
  misc_feature (1228)..(1228): n is a, c, g, or t
  misc_feature (1232)..(1232): n is a, c, g, or t
  misc_feature (1235)..(1235): n is a, c, g, or t
  misc_feature (1239)..(1239): n is a, c, g, or t
  misc_feature (1254)..(1254): n is a, c, g, or t
  misc_feature (1256)..(1256): n is a, c, g, or t
  misc_feature (1264)..(1265): n is a, c, g, or t
  misc_feature (1268)..(1268): n is a, c, g, or t
  misc_feature (1273)..(1274): n is a, c, g, or t
  misc_feature (1280)..(1283): n is a, c, g, or t
  misc_feature (1288)..(1289): n is a, c, g, or t
  misc_feature (1294)..(1294): n is a, c, g, or t
  misc_feature (1305)..(1307): n is a, c, g, or t
  misc_feature (1309)..(1309): n is a, c, g, or t
  misc_feature (1318)..(1319): n is a, c, g, or t
  misc_feature (1323)..(1329): n is a, c, g, or t
  misc_feature (1333)..(1333): n is a, c, g, or t
  misc_feature (1336)..(1336): n is a, c, g, or t
tagagaaattactatgagaggatcgcatcaccatcaccatcacggatcctatttaggtgacactatagaatcgtcgacccacgcgtccgagcagcttgaacaagtcctgtcaaaaaaactggaggaggttgaaggtgaaatatccagttaccaggatgcaattgagattgaactagaaaacagccggccaaaggccaaggggggcctggccagcctggcaaaagatggctccaccgaggacaccgcgtccagcttgtgtggcgaggaggacacagaggacgaggagctggaagccgcggccagccacctgaacaaagacttataccgggagctccttggtggtgcccccggcagctcggaagcagcaggaagccccgagtggggcggcagacctccggccctggggtccctgctggaccccctccccactgcagccagcctgggcatctcagactccatccgcgaatgcatctcctctcagagcagcgaccccaaagatgcttcaggagacggtgagctggacctcagtggcattgatgacctggagattgacaggtacatcctgaatgagtcggaagcccgcgtgaaggccgagctgtggatgagggagaacgccgagtacctgcgggaacagagggaaaaagaagcaagaatagcgaaagagaaggagctcggcatctacaaggaacacaagcccaagaagtcttgcaagcgacgggagccaattcaggccagtaccgccagggaggccatcgagaagatgctggagcagaagaagatctccagcaagatcaattatagcgtgctccggggcctcagcagcgccggcgggggcagtccgcacagggaggatgcacagcgccgagactcctggtgacaggtggcacctgtcccacagccctcgtcccatgtggaacttaccattgggattgtgtttctattcagcaagggaaaccggaccaagcgtctgcatgtgtgtgatcaaatgtgggccgggtgtgtgcanggctgggtcccgctgcctgccgtcaactcatccaagnacctcccaggctggcatgtggtgttnctactattaaggaaanagncttggggcanccccntgctggtcnaatntntgnaggctnaattgctgncctntnatcagacaantttgaattncanccacctcnnacgtccctttnaaaaatnggnccananctttncaaagnaacnaancntnagttcngccnccnggantaaattgccttaaananccctttannccntcccnntggccnnnnaaaannccttnaaaaaaccccnnntntaaacctcnntttnnnnnnnaaanggnaaccc

SEQ ID NO: 217 - DNA, 1002 bp, Homo Sapiens
  misc_feature (2)..(2): n is a, c, g, or t
  misc_feature (7)..(7): n is a, c, g, or t
  misc_feature (689)..(689): n is a, c, g, or t
  misc_feature (691)..(1002): n is a, c, g, or t
tnagagnaattactatgagaggatcgcatcaccatcaccatcacggaatcctatttaggtgacactatagaatcgtcgacccacgcgtccggatctgtgaaaatggttcgctattcacttgacccggagaaccccacgaaatcatgcaaatcaagaggttccaatcttcgtgttcactttaagaacactcgtgaaactgctcaggccatcaagggtatgcatatacgaaaagccacgaagtatctgaaagatgtcactttacagaaacagtgtgtaccattccgacgttacaatggtggagttggcaggtgtgcgcaggccaagcaatggggctggacacaaggtcggtggcccaaaaagagtgctgaatttttgctgcacatgcttaaaaacgcagagagtaatgctgaacttaagggtttagatgtagattctctggtcattgagcatatccaagtgaacaaagcacctaagatgcgccgccggacctacagagctcatggtcggattaacccatacatgagctctccctgccacattgagatgatccttacggaaaaggaacagattgttcctaaaccagaagaggaggttgcccagaagaaaaagatatcccagaagaaactgaagaaacaaaaacttatggcacgggagtaaattcagcattaaaataaatgtaattaaaaggnannnnnnnnnnnnnnnnnnnnnnnnnnnnnnnnnnnnnnnnnnnnnnnnnnnnnnnnnnnnnnnnnnnnnnnnnnnnnnnnnnnnnnnnnnnnnnnnnnnnnnnnnnnnnnnnnnnnnnnnnnnnnnnnnnnnnnnnnnnnnnnnnnnnnnnnnnnnnnnnnnnnnnnnnnnnnnnnnnnnnnnnnnnnnnnnnnnnnnnnnnnnnnnnnnnnnnnnnnnnnnnnnnnnnnnnnnnnnnnnnnnnnnnnnnnnnnnnnnnnnnnnnnnnnnnnnnnnnnnnnnnnnnnnnnnnnnnnnnnnnnnnnnnnnnnn

SEQ ID NO: 218 - DNA, 1009 bp, Homo Sapiens
  misc_feature (1)..(1): n is a, c, g, or t
  misc_feature (445)..(445): n is a, c, g, or t
  misc_feature (502)..(502): n is a, c, g, or t
  misc_feature (648)..(650): n is a, c, g, or t
  misc_feature (689)..(689): n is a, c, g, or t
  misc_feature (701)..(701): n is a, c, g, or t
  misc_feature (712)..(713): n is a, c, g, or t
  misc_feature (716)..(716): n is a, c, g, or t
  misc_feature (723)..(723): n is a, c, g, or t
  misc_feature (728)..(728): n is a, c, g, or t
  misc_feature (732)..(732): n is a, c, g, or t
  misc_feature (734)..(735): n is a, c, g, or t
  misc_feature (743)..(743): n is a, c, g, or t
  misc_feature (747)..(748): n is a, c, g, or t
  misc_feature (751)..(751): n is a, c, g, or t
  misc_feature (757)..(758): n is a, c, g, or t
  misc_feature (768)..(768): n is a, c, g, or t
  misc_feature (770)..(770): n is a, c, g, or t
  misc_feature (773)..(773): n is a, c, g, or t
  misc_feature (778)..(778): n is a, c, g, or t
  misc_feature (780)..(781): n is a, c, g, or t
  misc_feature (790)..(790): n is a, c, g, or t
  misc_feature (793)..(793): n is a, c, g, or t
  misc_feature (795)..(795): n is a, c, g, or t
  misc_feature (798)..(799): n is a, c, g, or t
  misc_feature (803)..(803): n is a, c, g, or t
  misc_feature (806)..(807): n is a, c, g, or t
  misc_feature (809)..(810): n is a, c, g, or t
  misc_feature (813)..(813): n is a, c, g, or t
  misc_feature (817)..(820): n is a, c, g, or t
  misc_feature (824)..(827): n is a, c, g, or t
  misc_feature (830)..(831): n is a, c, g, or t
  misc_feature (833)..(834): n is a, c, g, or t
  misc_feature (838)..(839): n is a, c, g, or t
  misc_feature (842)..(843): n is a, c, g, or t
  misc_feature (845)..(846): n is a, c, g, or t
  misc_feature (853)..(854): n is a, c, g, or t
  misc_feature (856)..(857): n is a, c, g, or t
  misc_feature (860)..(860): n is a, c, g, or t
  misc_feature (863)..(864): n is a, c, g, or t
  misc_feature (867)..(869): n is a, c, g, or t
  misc_feature (872)..(872): n is a, c, g, or t
  misc_feature (875)..(876): n is a, c, g, or t
  misc_feature (881)..(881): n is a, c, g, or t
  misc_feature (883)..(887): n is a, c, g, or t
  misc_feature (889)..(892): n is a, c, g, or t
  misc_feature (894)..(897): n is a, c, g, or t
  misc_feature (899)..(899): n is a, c, g, or t
  misc_feature (902)..(902): n is a, c, g, or t
  misc_feature (905)..(912): n is a, c, g, or t
  misc_feature (915)..(917): n is a, c, g, or t
  misc_feature (919)..(920): n is a, c, g, or t
  misc_feature (926)..(926): n is a, c, g, or t
  misc_feature (929)..(929): n is a, c, g, or t
  misc_feature (931)..(937): n is a, c, g, or t
  misc_feature (939)..(942): n is a, c, g, or t
  misc_feature (950)..(951): n is a, c, g, or t
  misc_feature (953)..(955): n is a, c, g, or t
  misc_feature (958)..(958): n is a, c, g, or t
  misc_feature (960)..(970): n is a, c, g, or t
  misc_feature (972)..(972): n is a, c, g, or t
  misc_feature (975)..(980): n is a, c, g, or t
  misc_feature (983)..(992): n is a, c, g, or t
  misc_feature (994)..(995): n is a, c, g, or t
  misc_feature (998)..(1004): n is a, c, g, or t
  misc_feature (1008)..(1009): n is a, c, g, or t
naatagagaaattactatgagaggatcgcatcaccatcaccatcacggatcctatttaggtgacactatagaatcgtcgacccacgcgtccgcgctgcccacgctgggcgtggccgtgaaccgcacgctggggcaccggctggagcgtgtggtgttcctgacgggcgcacggggccgccgggccccacctggcatggcagtggtgacgctgggcgaggagcgacccattggacacctgcacctggcgctgcgccacctgctggagcagcacggcgacgactttgactggttcttcctggtgcctgacaccacctacaccgaggcgcacggcctggcacgcctaactggccacctcagcctggcctccgccgcccacctgtacctgggccggccccaggacttcatcggcggagagcccacccccggccgctactgccacggaggntttggggtgctgctgtcgcgcatgctgctgcaacaactgcgcccccacctggaaggntgccgcaacgacatcgtcagtgcgcgccctgacgagtggctgggtcgctgcattctcgatgccaccggggtgggctgcactggtgaccacgagggggtgcactatagccatctggagctgagccctggggagccagtgcaggaggnnnaccctcatttccgaagtgccctgacagcccaccctgtgngtgaccctgtgnacatgtaccanntgnacaaagntttcncccnanntgaactgnaacnnacntaccannaaaatccagnanttnacagngnnaaaatccanaanancanncatntgnncnnttnatgnnnnaccnnnnaanntnnttgnnccnngnntattcannannatnccnnccnnnctnccnnttttnannnnntnnnntnnnnantanttnnnnnnnnaannntnntttttntcntnnnnnnnannnnttaccccnntnnncantnnnnnnnnnnntnaannnnnnttnnnnnnnnnnannttnnnnnnnaaann

SEQ ID NO: 219 - DNA, 1272 bp, Homo Sapiens
  misc_feature (2)..(2): n is a, c, g, or t
  misc_feature (713)..(713): n is a, c, g, or t
  misc_feature (718)..(718): n is a, c, g, or t
  misc_feature (752)..(752): n is a, c, g, or t
  misc_feature (764)..(764): n is a, c, g, or t
  misc_feature (769)..(769): n is a, c, g, or t
  misc_feature (776)..(776): n is a, c, g, or t
  misc_feature (779)..(779): n is a, c, g, or t
  misc_feature (789)..(789): n is a, c, g, or t
  misc_feature (802)..(802): n is a, c, g, or t
  misc_feature (806)..(806): n is a, c, g, or t
  misc_feature (814)..(814): n is a, c, g, or t
  misc_feature (821)..(821): n is a, c, g, or t
  misc_feature (825)..(825): n is a, c, g, or t
  misc_feature (828)..(828): n is a, c, g, or t
  misc_feature (831)..(831): n is a, c, g, or t
  misc_feature (835)..(835): n is a, c, g, or t
  misc_feature (838)..(838): n is a, c, g, or t
  misc_feature (842)..(842): n is a, c, g, or t
  misc_feature (847)..(847): n is a, c, g, or t
  misc_feature (858)..(858): n is a, c, g, or t
  misc_feature (860)..(860): n is a, c, g, or t
  misc_feature (865)..(865): n is a, c, g, or t
  misc_feature (878)..(879): n is a, c, g, or t
  misc_feature (884)..(884): n is a, c, g, or t
  misc_feature (886)..(886): n is a, c, g, or t
  misc_feature (897)..(898): n is a, c, g, or t
  misc_feature (907)..(907): n is a, c, g, or t
  misc_feature (910)..(910): n is a, c, g, or t
  misc_feature (917)..(917): n is a, c, g, or t
  misc_feature (919)..(919): n is a, c, g, or t
  misc_feature (923)..(924): n is a, c, g, or t
  misc_feature (929)..(929): n is a, c, g, or t
  misc_feature (932)..(932): n is a, c, g, or t
  misc_feature (934)..(935): n is a, c, g, or t
  misc_feature (942)..(943): n is a, c, g, or t
  misc_feature (947)..(947): n is a, c, g, or t
  misc_feature (950)..(950): n is a, c, g, or t
  misc_feature (956)..(957): n is a, c, g, or t
  misc_feature (959)..(960): n is a, c, g, or t
  misc_feature (964)..(965): n is a, c, g, or t
  misc_feature (975)..(975): n is a, c, g, or t
  misc_feature (984)..(984): n is a, c, g, or t
  misc_feature (994)..(996): n is a, c, g, or t
  misc_feature (998)..(998): n is a, c, g, or t
  misc_feature (1000)..(1000): n is a, c, g, or t
  misc_feature (1005)..(1005): n is a, c, g, or t
  misc_feature (1007)..(1007): n is a, c, g, or t
  misc_feature (1009)..(1009): n is a, c, g, or t
  misc_feature (1016)..(1017): n is a, c, g, or t
  misc_feature (1020)..(1024): n is a, c, g, or t
  misc_feature (1032)..(1033): n is a, c, g, or t
  misc_feature (1036)..(1036): n is a, c, g, or t
  misc_feature (1042)..(1045): n is a, c, g, or t
  misc_feature (1049)..(1050): n is a, c, g, or t
  misc_feature (1052)..(1055): n is a, c, g, or t
  misc_feature (1058)..(1067): n is a, c, g, or t
  misc_feature (1071)..(1072): n is a, c, g, or t
  misc_feature (1081)..(1083): n is a, c, g, or t
  misc_feature (1089)..(1099): n is a, c, g, or t
  misc_feature (1108)..(1108): n is a, c, g, or t
  misc_feature (1112)..(1112): n is a, c, g, or t
  misc_feature (1114)..(1114): n is a, c, g, or t
  misc_feature (1116)..(1116): n is a, c, g, or t
  misc_feature (1119)..(1122): n is a, c, g, or t
  misc_feature (1125)..(1125): n is a, c, g, or t
  misc_feature (1130)..(1131): n is a, c, g, or t
  misc_feature (1134)..(1138): n is a, c, g, or t
  misc_feature (1142)..(1142): n is a, c, g, or t
  misc_feature (1144)..(1145): n is a, c, g, or t
  misc_feature (1147)..(1152): n is a, c, g, or t
  misc_feature (1158)..(1167): n is a, c, g, or t
  misc_feature (1171)..(1175): n is a, c, g, or t
  misc_feature (1177)..(1198): n is a, c, g, or t
  misc_feature (1200)..(1201): n is a, c, g, or t
  misc_feature (1207)..(1213): n is a, c, g, or t
  misc_feature (1216)..(1216): n is a, c, g, or t
  misc_feature (1220)..(1221): n is a, c, g, or t
  misc_feature (1225)..(1237): n is a, c, g, or t
  misc_feature (1240)..(1259): n is a, c, g, or t
  misc_feature (1262)..(1271): n is a, c, g, or t
antagagaaattactatgagaggatcgcatcaccatcaccatcacggatcctatttaggtgacactatagaatcgtcgacccacgcgtccgctcctccagtgctgtgcgcatggcagtgggctgcctgctggagctggccttcaaggtggctgcaggagagctcaagaatggatttgccatcatccggcccccaggacaccacgccgaggaatccacagccatgggattctgcttcttcaactctgtagccatcaccgcaaaactcctacagcagaagttgaacgtgggcaaggtcctcatcgtggactgggacattcaccatggcaatggcacccagcaggcgttctacaatgacccctctgtgctctacatctctctgcatcgctatgacaacgggaacttctttccaggctctggggctcctgaagaggttggtggaggaccaggcgtggggtacaatgtgaacgtggcatggacaggaggtgtggacccccccattggagacgtggagtaccttacagccttcaggacagtggtgatgcccattgcccacgagttctcacctgatgtggtcctagtctccgccgggtttgatgctgttgaaggacatctgtctcctctgggtggctactctgtcaccgccagatgttttggccacttgaccaggcagctgatgaccctggcagggggccgggtggtgctggccctgganggagnccatgacttgaccgccatctgtgatgcctctgangcttgtgtctcnggctntgctcantgnaaaactgcancccttggaatgangcantcttgcancaaaaancccnaanatncacncantggnccacnctaaaaaaaantncttcnaaaattccaaaannaaaancntggaaacttgnntgcaaaaanttnccccccntngttnntgggnccngnncccttgnnaaanggnccccanncnngggnnaaaaaccaangaaggcccnaaaaaatttnnnancnccccntngnccctttnnttnnnnngggggggnnccnaaaaannnncccnnannnnttnnnnnnnnnncccnngaaaaaaannncccccnnnnnnnnnnnaaaaaaaancccntngnaannnnaanccccnnccnnnnngaananncnnnnnnccccannnnnnnnnngggnnnnncnnnnnnnnnnnnnnnnnnnnnnanntttttnnnnnnnaanaaannaaannnnnnnnnnnnnttnnnnnnnnnnnnnnnnnnnnggnnnnnnnnnnc

SEQ ID NO: 220 - DNA, 966 bp, Homo Sapiens
tgagaggatcgcatcaccatcaccatcacggatcctatttaggtgacactatagaatcgtcgacccacgcgtccgggaagattctcaccactgaagggcgtaatgcacttatccacaaatcatctgttaattgtccttttagtagccaagacatgaagtacccatctcccttctttgtatttggtgaaaagattcgaactcgagccatctctgctaaaggcatgactttagtcacccccctgcagttgcttctctttgcctccaagaaagtccaatctgatgggcagattgtgcttgtagatgactggattaaactgcaaatatctcatgaagctgctgcctgtatcactggtctccgggcagccatggaggctttggttgttgaagtaaccaaacaacctgctatcatcagccagttggaccccgtaaatgaacgtatgctgaacatgatccgtcagatctctagaccctcagctgctggtatcaaccttatgattggcagtacacggtatggagatggtccacgtcctcccaagatggcccgatacgacaatggaagcggatatagaaggggaggttctagttacagtggtggaggctatggcggtggctatagcagtggaggctatggtagcggaggctatggtggcagcgccaactcctttcgggcaggatatggtgcaggtgttggtggaggctatagaggagtttcccgaggtggctttagaggcaactctggaggagactacagagggcctagtggaggctacagaggatctgggggattccagcgaggaggtggtaggggggcctatggaactggctactttggacagggaaagaggaggtggcggctattaaaacttgtttatgtcagttcctgtgtgtagacagtaaaggaaaaaaaggcatgctatgtgttacgtgttttttccagtatgtttatttgccaccaaaaagtaaatg

SEQ ID NO: 221 - DNA, 974 bp, Homo Sapiens
gattactatgagaggtcgcatcaccatcaccatcacggatcctatttaggtgacactatagaatcgtcgacccacgcgtccgcaggcgccgccgggacgggcacgggcgcgcgggctccggcgggcgccggctgccttcctccgtcgctcgctgtctctcccggccgcattctcctccgctgcggggccgagctctccccagcgctcgcaggaaggaagaagggagccgaggacgccgagaagttcccgcggcagccgcggatcccggccaaggcggaggctgcggctccgacggggcaggagcgcgatccacggcgaggggcgtacggccaaagggtccgcggcgtggagcgctcggaccttccgctctcccccgggcgtgggccgggaccccatgagacgcgcccacgaggggcgcgagattcctagcttgggcggcgctaggcggagggaggtgttgcagccgccggagccagagagctgccggcaggaggcggcggcggcaagaacttgaacttggcgtcgggagcgggcgccccggacgccccccgccggggccggggcgccgagggacctgcgccgcagcgctgccccccgaatggccgcggcggcggaccgggctcccgcgccgcggccctaggcggcctctcgccatggccaagtggctaaacaagtacttcagcttgggcaacagcaagaccaagagccccccgcagccgccgcggccagactaccgcgagcagcggcgccgaggcgagcggccctcgcagcccccccaggccgtgccgcaggcctcctccgccgcctcggcgtcctgcggtccggccaccgcctcctgcttctcagcctcttcgggctcgctgcccgacgacagcggcagcaccagcgacctcatccgcgcctaccgcgcgcagaaaggagcgagacttcgaggacccctacaacgggcctggctcgtcgctgcgcaactgcgc

SEQ ID NO: 222 - DNA, 857 bp, Homo Sapiens
  misc_feature (640)..(640): n is a, c, g, or t
  misc_feature (661)..(661): n is a, c, g, or t
  misc_feature (675)..(675): n is a, c, g, or t
  misc_feature (687)..(687): n is a, c, g, or t
  misc_feature (689)..(689): n is a, c, g, or t
  misc_feature (715)..(715): n is a, c, g, or t
  misc_feature (719)..(719): n is a, c, g, or t
  misc_feature (721)..(721): n is a, c, g, or t
  misc_feature (734)..(734): n is a, c, g, or t
  misc_feature (742)..(742): n is a, c, g, or t
  misc_feature (750)..(750): n is a, c, g, or t
  misc_feature (770)..(770): n is a, c, g, or t
  misc_feature (772)..(772): n is a, c, g, or t
  misc_feature (790)..(790): n is a, c, g, or t
  misc_feature (809)..(809): n is a, c, g, or t
  misc_feature (817)..(817): n is a, c, g, or t
ttatctatgagaggatcgcatcaccatcaccatcacggatcctatttaggtgacactatagaatcgtcgacccacgcgtccgcggacgcgtgggtgaccactgaagatcctggtgtcgccatgggccgccgccccgcccgttgttaccggtattgtaagaacaagccgtacccaaagtctcgcttctgccgaggtgtccctgatgccaagattcgcatttttgacctggggcggaaaaaggcaaaagtggatgagtttccgctttgtggccacatggtgtcagatgaatatgagcagctgtcctctgaagccctggaggctgcccgaatttgtgccaataagtacatggtaaaaagttgtggcaaagatggcttccatatccgggtgcggctccaccccttccacgtcatccgcatcaacaagatgttgtcctgtgctggggctgacaggctccaaacaggcatgcgaggtgcctttggaaagccccagggcactgtggccagggttcacattggccaagttatcatgtccatccgcaccaagctgcagaacaaggagcatgtgattgaggccctgcgcagggccaagttcaagtttcctggccgccagaaaatccacatctcaaagaagtggggcttcnccaagttcaatgctgatgaanttgaaaacatgggnggctgaaaaacngnctcatccccagatggctgtgggggtnaagnanatccccagtcgtnggcccccntgggaaangtgggcgggcccctgccccncntgaggggttttccaatgnggttgcccccctttttaanactcaccnaaaaaatcttaccttcccggcccaaaaaaaaaaaaaaaaa

SEQ ID NO: 223 - DNA, 835 bp, Homo Sapiens
  misc_feature (7)..(7): n is a, c, g, or t
  misc_feature (655)..(655): n is a, c, g, or t
  misc_feature (745)..(745): n is a, c, g, or t
  misc_feature (756)..(756): n is a, c, g, or t
  misc_feature (784)..(784): n is a, c, g, or t
  misc_feature (791)..(791): n is a, c, g, or t
  misc_feature (794)..(794): n is a, c, g, or t
  misc_feature (796)..(796): n is a, c, g, or t
  misc_feature (811)..(811): n is a, c, g, or t
  misc_feature (814)..(814): n is a, c, g, or t
  misc_feature (829)..(829): n is a, c, g, or t
  misc_feature (832)..(832): n is a, c, g, or t
  misc_feature (835)..(835): n is a, c, g, or t
tcttaangaggagaattaactatgagaggatcgcatcaccatcaccatcacggatcctatttaggtgacactatagaatcgtcgacccacgcgtccgccatggagggtgtagaagagaagaagaaggaggttcctgctgtgccagaaacccttaagaaaaagcgaaggaatttcgcagagctgaagatcaagcgcctgagaaagaagtttgcccaaaagatgcttcgaaaggcaaggaggaagcttatctatgaaaaagcaaagcactatcacaaggaatataggcagatgtacagaactgaaattcgaatggcgaggatggcaagaaaagctggcaacttctatgtacctgcagaacccaaattggcgtttgtcatcagaatcagaggtatcaatggagtgagcccaaaggttcgaaaggtgttgcagcttcttcgccttcgtcaaatcttcaatggaacctttgtgaagctcaacaaggcttcgattaacatgctgaggattgtagagccatatattgcatgggggtaccccaatctgaagtcagtaaatgaactaatctacaagcgtggttatggcaaaatcaataagaagcgaattgctttgacagataacgctttgattgctcgatctcttggtaaatacggcatcatcntgcatgggaggatttgattcatgagatctatactgttggaaaacgcttcaaagaggcaaataacttcctgtggcccttcaaattgtcttnctccccgaggnggaatgaagaaaaagacacccctttttngtaaaanggngnagatgctggccaaanggnaggaccagatcaacnggnttn

SEQ ID NO: 224 - DNA, 1015 bp, Homo Sapiens
  misc_feature (7)..(7): n is a, c, g, or t
  misc_feature (813)..(813): n is a, c, g, or t
  misc_feature (821)..(821): n is a, c, g, or t
  misc_feature (841)..(841): n is a, c, g, or t
  misc_feature (846)..(846): n is a, c, g, or t
  misc_feature (857)..(857): n is a, c, g, or t
  misc_feature (864)..(864): n is a, c, g, or t
  misc_feature (876)..(876): n is a, c, g, or t
  misc_feature (884)..(884): n is a, c, g, or t
  misc_feature (902)..(902): n is a, c, g, or t
  misc_feature (909)..(909): n is a, c, g, or t
  misc_feature (915)..(916): n is a, c, g, or t
  misc_feature (924)..(924): n is a, c, g, or t
  misc_feature (933)..(933): n is a, c, g, or t
  misc_feature (945)..(946): n is a, c, g, or t
  misc_feature (948)..(948): n is a, c, g, or t
  misc_feature (955)..(955): n is a, c, g, or t
  misc_feature (958)..(958): n is a, c, g, or t
  misc_feature (978)..(979): n is a, c, g, or t
  misc_feature (987)..(990): n is a, c, g, or t
  misc_feature (995)..(995): n is a, c, g, or t
  misc_feature (998)..(998): n is a, c, g, or t
  misc_feature (1001)..(1004): n is a, c, g, or t
agagganaattaactatgagaggatcgcatcaccatcaccatcacggatcctatttaggtgacactatagaatcgtcgacccacgcgtccgagcccagcaagctgaatagcattggcaattactacaagccgtggttctttaagcatgtggagaactatctgaagacaaaccgagagggcctggagtacattcccttgagacactactaccaccgccacacgcgcagcatcttctgggagctccaggacatcatcccctttggcaacaaccccatcttccgctacctctttggctggatggtgcctcccaagatctccctcctgaagctgacccagggtgagaccctgcgcaagctgtacgagcagcaccacgtggtgcaggacatgctggtgcccatgaagtgcctgcagcaggccctgcacaccttccaaaacgacatccacgtctaccccatctggctgtgtccgttcatcctgcccagccagccaggcctagtgcaccccaaaggaaatgaggcagagctctacatcgacattggagcatatggggagccgcgtgtgaaacactttgaagccaggtcctgcatgaggcagctggagaagtttgtccgcagcgtgcatggcttccagatgctgtatgccgactgctacatgaaccgggaggagttctgggagatgtttgatggctccttgtaccacaagctgcgagagaagctgggttgccaggacgccttccccgaggtgtacgacaagatctgcaaggccgccaggcactgagctggagcccgcctggagagacagacacgtgtgagnggtcaggnatcttcccttcactcaaggnttggntgctttcctanatccacncttttcaaaganaaaccccntccaaaaactcccacccntgaaagnccaaannccaccttncttcctggntttccagggggnnanccccagnggnaatgggaaaaaaatgggggnntttggagnnnnaaaangcntgnnnnccagttccccc

SEQ ID NO: 225 - DNA, 1167 bp, Homo Sapiens
taacggtgggggagggagattactatgagaggatcgcatcaccatcaccatcacggatcctatttaggtgacactatagaatcgtcgacccacgcgtccggagtcgtaaaactctcttctgcccctgtcgtcttgttgtagacttactctcctaaacagcccaaactgctgacgtttgtcttcattggatgtttgatgtttcactcatctgaagaacccctggtatttcattttgatcaatggggaacgctcacggactgtgtggctggagagatccaaaaaaaaagcgctccggggctttgggtttgtcacatatgccactgtggaaaatgtggatgcttggactcctgttggccactccaggtggatggaagagttgtggaaccgatttgagctgtctcctgagaagattctcaaagattttttgcccacttaactgtgaaaaagatatttgttggtggcattaaataagacactgaaaaacatcacctaaaacattgttttgaccaccatggaaaaattgaagtgattgaaatcatgactgatcgaggcattgccaacaattgggcctttgcctttgtaacctttgactaccatgactccttggatcttattgtcattcagaaataccatactgtgaatgtcttctcctgtgatgatacaaaatctttgtcgcaggaagagagggctactgcttcatcctatcaaagaggtcgaagtggttctggaaatttggtggtggtcgtgcagttgttttcggtggtcatggaacttctgacgtgtattaatcttcctggtcgagtacgccttcgatgtccccctgtttctacacatatattgcgcaagatggggatgtgtatcagtgaaacctggccctattttccctaaagggtttattgagaaatatgttttttcgtctcaccaatccctggtgagtctcaccagttttgattaaacgtggcaatatggacacttcttcgccccgtttcaccatgggcaaatatatacgcaaggcgacaggtgctgatgccgctggcgatcaggtcatcatgcgttgtgatggcttccatgtcggcagatgcctatgaatacaacagtactgcatgagtggcaggcgggcgtaatttattaaggcagtaattggtgtccataaacgcctggggtatg

SEQ ID NO: 226 - DNA, 700 bp, Homo Sapiens
  misc_feature (651)..(651): n is a, c, g, or t
  misc_feature (660)..(660): n is a, c, g, or t
  misc_feature (666)..(666): n is a, c, g, or t
  misc_feature (675)..(676): n is a, c, g, or t
  misc_feature (679)..(679): n is a, c, g, or t
  misc_feature (682)..(683): n is a, c, g, or t
  misc_feature (685)..(687): n is a, c, g, or t
  misc_feature (689)..(689): n is a, c, g, or t
  misc_feature (691)..(695): n is a, c, g, or t
  misc_feature (697)..(698): n is a, c, g, or t
  misc_feature (700)..(700): n is a, c, g, or t
tagagagattactatgagaggatcgcatcaccatcaccatcacggatcctatttaggtgacactatagaatcgtcgacccacgcgatccgacatcacggagctgaatctgccgcagctagaaatgctcaagaaccagctggaccaggaagtggagttcttgtccacgtccattgctcagctcaaagtggtacagaccaagtatgtggaagccaaggactgtctgaacgtgctgaacaagagcaacgaggggaaagaattactcgtcccactgacgagttctatgtatgtccctgggaagctgcatgatgtggaacacgtgctcatcgatgtgggaactgggtactatgtagagaagacagctgaggatgccaaggacttcttcaagaggaagatagattttctaaccaagcagatggagaaaatccaaccagctcttcaggagaagcacgccatgaaacaggccgtcatggaaatgatgagtcagaagattcagcagctcacagccctgggggcagctcaggctactgctaaggcctgagagtttttgcagaaatggggcagagggacaccctttgggcgtggcttcctggtgatgggaagggtcttgtgttttaatgccaataaatgtgccagctgggcagaatgttaanaaaaaaaanaaaaanaaaaaaaannaanatnnannnanannnnnannan

SEQ ID NO: 227 - DNA, 871 bp, Homo Sapiens
  misc_feature (425)..(425): n is a, c, g, or t
  misc_feature (621)..(621): n is a, c, g, or t
  misc_feature (629)..(629): n is a, c, g, or t
  misc_feature (644)..(644): n is a, c, g, or t
  misc_feature (647)..(647): n is a, c, g, or t
  misc_feature (654)..(654): n is a, c, g, or t
  misc_feature (661)..(662): n is a, c, g, or t
  misc_feature (668)..(668): n is a, c, g, or t
  misc_feature (671)..(671): n is a, c, g, or t
  misc_feature (677)..(677): n is a, c, g, or t
  misc_feature (687)..(687): n is a, c, g, or t
  misc_feature (689)..(689): n is a, c, g, or t
  misc_feature (695)..(695): n is a, c, g, or t
  misc_feature (712)..(712): n is a, c, g, or t
  misc_feature (724)..(724): n is a, c, g, or t
  misc_feature (735)..(735): n is a, c, g, or t
  misc_feature (738)..(738): n is a, c, g, or t
  misc_feature (750)..(750): n is a, c, g, or t
  misc_feature (753)..(753): n is a, c, g, or t
  misc_feature (756)..(756): n is a, c, g, or t
  misc_feature (762)..(762): n is a, c, g, or t
  misc_feature (768)..(768): n is a, c, g, or t
  misc_feature (772)..(772): n is a, c, g, or t
  misc_feature (793)..(793): n is a, c, g, or t
  misc_feature (795)..(795): n is a, c, g, or t
  misc_feature (798)..(798): n is a, c, g, or t
  misc_feature (800)..(800): n is a, c, g, or t
  misc_feature (803)..(803): n is a, c, g, or t
  misc_feature (807)..(807): n is a, c, g, or t
  misc_feature (812)..(814): n is a, c, g, or t
  misc_feature (830)..(831): n is a, c, g, or t
  misc_feature (849)..(849): n is a, c, g, or t
  misc_feature (854)..(854): n is a, c, g, or t
ccctcaccatcacggatcctatttaggtgacactatagaatcgtcgacccacgcgtccgagcacattaaaaagccgattcgctccacagtcctcagcttggattggcatcccaacaacgttttgctggcagcaggatcatgtgacttcaaatgcagagtgttttctgcctacattaaagaagtggatgaaaagccagccagcacgccctggggcagcaagatgccttttgggcagctgatgtcagagtttggtggcagtggcactggtggctgggtccacggggtaagcttctctgccagtgggagccgcctggcctgggtcagccacgacagcaccgtgtctgttgctgatgcctcaaaaagtgtgcaggtctcgactctgaagacagagttcctgccgctcctaagtgtgtcatttgtctcanagaacagcggcgtggctgctggccatgactgctgcccaatgctctttaactacgatgaccgcggctgcctgaccttcgtctccaagtttagatattccaaaacagagcatccaacgcaacatgtctgccatggaaacgcttccgcaacatggacaaaaagagccacaactgaggaccgcaaccacggcctttgganacgctgcncccagaatagcatcnctnccagtcnctatttnntgaggnggnacaaancaaggatttncnccaaantttttgcccctactggncaatcgatgggnacccattgaanaantttgggaatttnaanaanccctcngaggtntttnccatcccaggggcctcccggnanaangnggnaacntggannngggaccctcccccccnnccccaggatggaacaaancttgngggccccgaacccccaa

SEQ ID NO: 228 - DNA, 548 bp, Homo Sapiens
  misc_feature (5)..(5): n is a, c, g, or t
  misc_feature (36)..(36): n is a, c, g, or t
  misc_feature (38)..(38): n is a, c, g, or t
  misc_feature (46)..(46): n is a, c, g, or t
  misc_feature (68)..(68): n is a, c, g, or t
  misc_feature (431)..(431): n is a, c, g, or t
  misc_feature (452)..(452): n is a, c, g, or t
  misc_feature (457)..(457): n is a, c, g, or t
  misc_feature (470)..(470): n is a, c, g, or t
  misc_feature (475)..(475): n is a, c, g, or t
  misc_feature (483)..(483): n is a, c, g, or t
  misc_feature (504)..(504): n is a, c, g, or t
  misc_feature (507)..(507): n is a, c, g, or t
  misc_feature (521)..(521): n is a, c, g, or t
  misc_feature (524)..(526): n is a, c, g, or t
  misc_feature (530)..(531): n is a, c, g, or t
  misc_feature (540)..(543): n is a, c, g, or t
gaatntaaaaattatttgctttgtgagcggatacantntatgattnattgtgagcggataacaatttncacagaattattaaagaggagaaattaactatgagaggatcgcatcaccatcaccatcacggatcctatttaggtgacactatagaatcgtcgacccacgcgtccggccgaaccgcagcttcttggcttaggtacttctactcacagcggccgattccgaggccaactccagcaatggcttttgcaaatctgcggaaagtgctcatcagtgacagcctggacccttgctgccggaagatcttgcaagatggagggctgcaggtggtggaaaagcagaaccttagcaaagaggagctgatagcggagctgcaggactgtgaaggccttattgttcgctctgccaccaaggtgaccgctgatgtnatcaacgcagctgagaaactncaggnggtggggcagggnctggnacaggtgnggacaatgtggatctggaggncgnaacaaaggaagggnatnnntggnnatgaacacnnnnaatgg

SEQ ID NO: 229 - DNA, 926 bp, Homo Sapiens
atgagaggatcgcatcaccatcaccatcacggatcctatttaggtgacactatagaatcgtcgacccacgcgtccgcgggagcggagagcggaccccagagagccctgagcagccccaccgccgccgccggcctagttaccatcacaccccgggaggagccgcagctgccgcagccggccccagtcaccatcaccgcaaccatgagcagcgaggccgagacccagcagccgcccgccgccccccccgccgcccccgccctcagcgccgccgacaccaagcccggcactacgggcagcggcgcagggagcggtggcccgggcggcctcacatcggcggcgcctgccggcggggacaagaaggtcatcgcaacgaaggttttgggaacagtaaaatggttcaatgtaaggaacggatatggtttcatcaacaggaatgacaccaaggaagatgtatttgtacaccagactgccataaagaagaataaccccaggaagtaccttcgcagtgtaggagatggagagactgtggagtttgatgttgttgaaggagaaaagggtgcggaggcagcaaatgttacaggtcctggtggtgttccagttcaaggcagtaaatatgcagcagaccgtaaccattatagacgctatccacgtcgtaggggtcctccacgcaattaccagcaaaattaccagaatagtgagagtggggaaaagaacgagggatcggagagtgctcccgaaggccaggcccaacaacgccggccctaccgcaggcgaaggttcccaccttactacatgcggagaccctatgggcgtcgaccacagtattccaaccctcctgtgcagggagaaagtgatggagggtgctgacaccagggtgcaggagaacaaaggtagaccagtgaggcagaatatgtatcggggatata

SEQ ID NO: 230 - DNA, 973 bp, Homo Sapiens
  misc_feature (65)..(65): n is a, c, g, or t
  misc_feature (729)..(729): n is a, c, g, or t
  misc_feature (849)..(849): n is a, c, g, or t
  misc_feature (872)..(872): n is a, c, g, or t
  misc_feature (877)..(877): n is a, c, g, or t
  misc_feature (879)..(879): n is a, c, g, or t
  misc_feature (881)..(881): n is a, c, g, or t
  misc_feature (887)..(887): n is a, c, g, or t
  misc_feature (895)..(895): n is a, c, g, or t
  misc_feature (923)..(923): n is a, c, g, or t
  misc_feature (927)..(927): n is a, c, g, or t
  misc_feature (929)..(929): n is a, c, g, or t
  misc_feature (931)..(931): n is a, c, g, or t
  misc_feature (935)..(936): n is a, c, g, or t
  misc_feature (953)..(954): n is a, c, g, or t
  misc_feature (958)..(958): n is a, c, g, or t
  misc_feature (965)..(965): n is a, c, g, or t
  misc_feature (967)..(967): n is a, c, g, or t
  misc_feature (970)..(970): n is a, c, g, or t
  misc_feature (973)..(973): n is a, c, g, or t
atagagaaattactatgagaggatcgcatcaccatcaccatcacggatcctatttaggtgacacnatagaatcgtcgacccacgcgtccgcaaatatctctgcacaccacatctccctggcctcctgcctggcactgaccacccccagtgaagagttgccggaccgggcaggcatcctggtggaagatgccacctgtgtcacctgcatgtcagacagcagccaaagtgtccctttggtggcttctccaggacactgctcagattctttcagcacttcagggcttgaagactcttgcacagagaccagctcgagccccagggacaaggccatcaccccgccactgccagaaagtactgtgcccttcagcaatggggtgctgaagggggagttgtcagacttgggggctgaggatggatggaccatggatgcggaagcagatcattcaggaggttctgacaggaacagcatggattccgtggatagctgttgcagtctcaagaagactgagagcttccaaaatgcccaggcaggctccaaccctaagaaggtcgacctcatcatctgggagatcgaggtgccaaagcacttagtcggtcggctaattggcaagcaggggcgctatgtgagttttctgaagcaaacatctggtgccaagatctacatttcaaccctgccttacacccagagcgtccagatctgccacatagaaggctctcaacatcatgtanacaaagcgctgaacttgattgggaagaagttcaaagagctgaacctcaccaatatctacgctcccccattgccttcactggcactgcctttctctgccgatgacattcctggcctcatgnctgcctgatggcatcaccgtggnaggtnantngtggtncaaccaanttcaatgcccgggccacctgtttcgtgncatnancnaaannaacccctaacctttccnngcgnttgcgcnanccntcn

SEQ ID NO: 231 - DNA, 1349 bp, Homo Sapiens
  misc_feature (921)..(921): n is a, c, g, or t
  misc_feature (952)..(952): n is a, c, g, or t
  misc_feature (971)..(971): n is a, c, g, or t
  misc_feature (984)..(984): n is a, c, g, or t
  misc_feature (986)..(986): n is a, c, g, or t
  misc_feature (992)..(992): n is a, c, g, or t
  misc_feature (996)..(996): n is a, c, g, or t
  misc_feature (1001)..(1001): n is a, c, g, or t
  misc_feature (1003)..(1003): n is a, c, g, or t
  misc_feature (1029)..(1029): n is a, c, g, or t
  misc_feature (1052)..(1052): n is a, c, g, or t
  misc_feature (1090)..(1090): n is a, c, g, or t
  misc_feature (1094)..(1094): n is a, c, g, or t
  misc_feature (1101)..(1101): n is a, c, g, or t
  misc_feature (1104)..(1104): n is a, c, g, or t
  misc_feature (1124)..(1124): n is a, c, g, or t
  misc_feature (1131)..(1131): n is a, c, g, or t
  misc_feature (1134)..(1135): n is a, c, g, or t
  misc_feature (1155)..(1155): n is a, c, g, or t
  misc_feature (1159)..(1159): n is a, c, g, or t
  misc_feature (1181)..(1181): n is a, c, g, or t
  misc_feature (1189)..(1190): n is a, c, g, or t
  misc_feature (1198)..(1198): n is a, c, g, or t
  misc_feature (1202)..(1202): n is a, c, g, or t
  misc_feature (1209)..(1209): n is a, c, g, or t
  misc_feature (1222)..(1222): n is a, c, g, or t
  misc_feature (1243)..(1243): n is a, c, g, or t
  misc_feature (1247)..(1248): n is a, c, g, or t
  misc_feature (1275)..(1275): n is a, c, g, or t
  misc_feature (1280)..(1280): n is a, c, g, or t
  misc_feature (1287)..(1287): n is a, c, g, or t
  misc_feature (1290)..(1290): n is a, c, g, or t
  misc_feature (1297)..(1297): n is a, c, g, or t
  misc_feature (1314)..(1314): n is a, c, g, or t
  misc_feature (1316)..(1316): n is a, c, g, or t
  misc_feature (1328)..(1328): n is a, c, g, or t
  misc_feature (1333)..(1349): n is a, c, g, or t
caatagagaaattactatgagaggatcgcatcaccatcaccatcacggatcctatttaggtgacactatagaatcgtcgacccacgcgtccgagatcttaccaaagtccacacggaatgctgccatggagatctgcttgaatgtgctgatgacagggcggaccttgccaagtatatctgtgaaaatcaagattcgatctccagtaaactgaaggaatgctgtgaaaaacctctgttggaaaaatcccactgcattgccgaagtggaaaatgatgagatgcctgctgacttgccttcattagctgctgattttgttgaaagtaaggatgtttgcaaaaactatgctgaggcaaaggatgtcttcctgggcatgtttttgtatgaatatgcaagaaggcatcctgattactctgtcgtgctgctgctgagacttgccaagacatatgaaaccactctagagaagtgctgtgccgctgcagatcctcatgaatgctatgccaaagtgttcgatgaatttaaacctcttgtggaagagcctcagaatttaatcaaacaaaattgtgagctttttgagcagcttggagagtacaaattccagaatgcgctattagttcgttacaccaagaaagtaccccaagtgtcaactccaactcttgtagaggtctcaagaaacctaggaaaagtgggcagcaaatgttgtaaacatcctgaagcaaaaagaatgccctgtgcagaagactatctatccgtggtcctgaaccagttatgtgtgttgcatgagaaaacgccagtaagtgacagagtcaccaaatgctgcacagaatccttggtgaacaggcgaccatgctttttcagctctggaagtcgatgaaacatacgttcccaaagagtttaatgctgaaaacattcaccttccatgcanatatatgcacactttctgagaaggaaagacnaatcaagaaacaaactgcncttgttgaagctngngaaacncaancccangncaacaaaaaaacaactgaaagctgtnatggatgatttccccaccttttngtaaaaaaatgctgcaaggctgaacaataaaggaaacntgcnttgcccnaanaaggtaaaaaacttgttgcngcaaatncannctgccctaagccttaaaacncccnttttaaaacccccccccccccngggaatannaaaaaaangganatccaanccttttccccggnttttcttttccggggggaaancccnncccggccaaaaaaaaaatttctaaacntttgnccccttnccnggccccnttaaaaaagggaaaccntnaaaaaaaaaaanaaaannnnnnnnnnnnnnnnn

SEQ ID NO: 232 - DNA, 516 bp, Homo Sapiens
atgagaggatcgcatcaccatcaccatcacggatcctatttaggtgacactatagaatcgtcgacccacgcgtccgtcccacttttcataacgagttggaagtacgtcctggggtacaagcagactctgaagatgatcagacaaggcaaagcgaaattggtcattctcgctaacaactgcccagctttgaggaaatctgaaatagagtactatgctatgttggctaaaactggtgtccatcactacagtggcaataatattgaactgggcacagcatgcggaaaatactacagagtgtgcacactggctatcattgatccaggtgactctgacatcattagaagcatgccagaacagactggtgaaaagtaaaccttttcacctacaaaatttcacctgcaaaccttaaacctgcaaaattttcctttaataaaatttgcttgttttaaaaaaaaaaaaaaaaaaaaaaaaaaaaaaaaaaaaaaaaaaaaaaaaaaaaaaaaaaaaaaaaagggg

SEQ ID NO: 233 - DNA, 668 bp, Homo Sapiens
ttactatgagaggatcgcatcaccatcaccatcacggatcctatttaggtgacactatagaatcgtcgacccacgcgtccgctaaaatctccaggggcaccattgaaatcctgagtgatgtgcagctgatcaagactggagacaaagtgggagccagcgaagccacgctgctgaacatgctcaacatctcccccttctcctttgggctggtcatccagcaggtgttcgacaatggcagcatctacaaccctgaagtgcttgatatcacagaggaaactctgcattctcgcttcctggagggtgtccgcaatgttgccagtgtctgtctgcagattggctacccaactgttgcatcagtaccccattctatcatcaacgggtacaaacgagtcctggccttgtctgtggagacggattacaccttcccacttgctgaaaaggtcaaggccttcttggctgatccatctgcctttgtggctgctgcccctgtggctgctgccaccacagctgctcctgctgctgctgcagccccagctaaggttgaagccaaggaagagtcggaggagtcggacgaggatatgggatttggtctctttgactaatcaccaaaaagcaaccaacttagccagttttatttgcaaaacaaggaaataaaggcttacttcttt

SEQ ID NO: 234 - DNA, 789 bp, Homo Sapiens
tgagaggatcgcatcaccatcaccatcacggatcctatttaggtgacactatagaatcgtcgacccacgcgtccgggttgcaacccgagctgcacaccaaggagcagattttggagcttctggtgatggagcagttcctgaccatcctgcccccggagatccaggctcgggtcaggcatcgatgtccaatgagcagcaaggagattgtgaccctcgtggaagattttcacagagcatccaagaaaccaaagcagtgggtggccgtttgtatgcaggggcaaaaggtgctcttggagaaaactggatctcagcttggagaacaggaactgccagactttcaaccgcagactcctaggagagatctcagggagagctctccagcagagccttcccaggcaggagcttatgaccggctgagcccccatcattgggagaaatccccactcctccaagaaccaacccccaaattggctgggacagaggcccccagaatgagaagtgacaacaaggaaaatccacaacaggaaggggctaaaggagcaaagccatgtgcagtgtcagctggcagatccaaagggaatggtctgcagaatcctgaaccaagaggggcaaatatgagtgaacctcggttgtcacggaggcaggtcagctccccaaatgctcaaaagccatttgctcactaccagagacattgcagggtggaatacatcagcagccccctaaaaagccacccactgagagagctaaagaaaagcaaaggaggtaaacggagtctgagcaaccgtttgc

SEQ ID NO: 235 - DNA, 1044 bp, Homo Sapiens
  misc_feature (786)..(786): n is a, c, g, or t
  misc_feature (789)..(789): n is a, c, g, or t
  misc_feature (822)..(822): n is a, c, g, or t
  misc_feature (874)..(875): n is a, c, g, or t
  misc_feature (891)..(891): n is a, c, g, or t
  misc_feature (898)..(898): n is a, c, g, or t
  misc_feature (925)..(925): n is a, c, g, or t
  misc_feature (927)..(928): n is a, c, g, or t
  misc_feature (934)..(934): n is a, c, g, or t
  misc_feature (948)..(948): n is a, c, g, or t
  misc_feature (954)..(954): n is a, c, g, or t
  misc_feature (963)..(963): n is a, c, g, or t
  misc_feature (992)..(992): n is a, c, g, or t
  misc_feature (994)..(994): n is a, c, g, or t
  misc_feature (1000)..(1000): n is a, c, g, or t
  misc_feature (1003)..(1004): n is a, c, g, or t
  misc_feature (1009)..(1011): n is a, c, g, or t
  misc_feature (1013)..(1014): n is a, c, g, or t
  misc_feature (1028)..(1028): n is a, c, g, or t
  misc_feature (1040)..(1040): n is a, c, g, or t
  misc_feature (1044)..(1044): n is a, c, g, or t
tagagaaattactatgagaggatcgcatcaccatcaccatcacggatcctatttaggtgacactatagaatcgtcgacccacgcgtccgtgaattggtgcgtcatttccgacatggaagtcatcgagctgaacaaatgcacctcgggccaatcctttgaagtcatcctgaagccaccctcctttgatggggttcccgagttcaacgcctccctgccaaggcggcgagacccatccctggaagagatccagaagaaactagaagcggctgaggagcgaaggaagtaccaggaagcggagctcctgaaacacctagcagagaaacgggaacatgagagagaggtgatccaaaaggccattgaggaaaacaacaacttcatcaagatggctaaggaaaaactggcccagaagatggaatccaacaaggagaacagggaggcccacctcgccgccatgttggaacggctgcaagagaaggacaagcacgccgaggaggtgcggaaaaacaaggagctgaaggaagaggcctccaggtaaagcctagaggccaaagaactttccaggtcagccggacagctccagcagctccacgttccaggcagcctcgcccgccggctgcgctcccagcactggggtttggggggaggggggtggccaaggggcgtttcctctgcttttggtgtttgtacatgttaagaattgaccagtgaagccatcctatttgtttccggggaacaatgacggggtgggagaggggagaggaaagagtttgggaaaaggagatgganaanaactcaaggacattgcaaccctgcccggcgcanatctgattttcacatctctacctggacattgaaccctccaggcaccatgttnnaggaagagatgaaaanccagggncggttaaaacttccgggttgaaagganannagttcntgggttggggcaancggctncaggggccncacccaaataaccccactccagaaggggngntgaatnccnntgggnnntnncttccccccctgcnacaggggggaanaagn

SEQ ID NO: 236 - DNA, 102 bp, Homo Sapiens
atgagaggatcgcatcaccatcaccatcacggatcctatttaggtgacactatagaatcgtcgacccacgcgtccgcacctcttgagaaggaggaagctgaa

SEQ ID NO: 237 - DNA, 1109 bp, Homo Sapiens
  misc_feature (913)..(913): n is a, c, g, or t
  misc_feature (978)..(978): n is a, c, g, or t
  misc_feature (981)..(981): n is a, c, g, or t
  misc_feature (995)..(995): n is a, c, g, or t
  misc_feature (997)..(997): n is a, c, g, or t
  misc_feature (1013)..(1013): n is a, c, g, or t
  misc_feature (1048)..(1048): n is a, c, g, or t
  misc_feature (1053)..(1053): n is a, c, g, or t
  misc_feature (1067)..(1068): n is a, c, g, or t
  misc_feature (1088)..(1088): n is a, c, g, or t
  misc_feature (1106)..(1106): n is a, c, g, or t
  misc_feature (1108)..(1108): n is a, c, g, or t
tagagaaaattactatgagaggatcgcatcaccatcaccatcacggatcctatttaggtgacactatagaatcgtcgacccacgcgtccgcagaaatgcctgccagagaggactgtttaaaaagagtgtcctcagaacctgttctgtcagttcaagaaaaaggtgttctgctgaaaagaaagttgtctcttttagaacaggatgtgattgtaaatgaagatggaagaaataagctgaaaaaacaaggagcttatggtgatattccagaagaattaatcgatgtctcagatttcgagtgttctctctgcatgaggttgttttttgagccagtaacaaccccttgcggacattcgttctgtaagaattgtcttgagcgttgtttagatcatgcaccatattgtcctctttgcaaagaaagcttaaaagagtatctagcagataggaggtactgtgtcacacagctgttggaagaattaatagtgaagtatctgcctgatgaactgtctgagagaaaaaaaatatatgatgaagaaactgctgaactctcacacttgaccaagaatgttccaatatttgtttgcactatggcctaccccactgtgccttgccctctccatgtatttgagccaagatacagattgatgattcgaagaagtatacagactggaaccaaacagtttggcatgtgtgtcagtgatacacaaaatagttttgcagattatggttgtatgttacaaattagaaacgtgcatttcttaccggacggaaggtctgtggttgatacagttggaggaaagcggtttagggttttaaaaagaggaatgaaagatggatattgcactgccgacattgaatatctggaagatgttaaggttgagaatgaagatgagattaagaatctcagagagcttcntgattgggttactctcagcctgcagctggttccaaatttaaagacagattcgaagccaattctcngcnttcggatcatgccnanagggaggaaaccttcnggcccccctaaggacctgctggggtggggctctgngttcncctgaaacccccannccactgccgtttgccatgantcttgaaaaacggtgacnana

SEQ ID NO: 238 - DNA, 949 bp, Homo Sapiens
  misc_feature (842)..(842): n is a, c, g, or t
  misc_feature (890)..(890): n is a, c, g, or t
  misc_feature (893)..(893): n is a, c, g, or t
  misc_feature (914)..(914): n is a, c, g, or t
  misc_feature (923)..(923): n is a, c, g, or t
  misc_feature (930)..(930): n is a, c, g, or t
  misc_feature (938)..(938): n is a, c, g, or t
tagagaaattactatgagaggatcgcatcaccatcaccatcacggatcctatttaggtgacactatagaatcgtcgacccacgcgtccgcccacgcgtccgcccacgcgtccgagcagtttgagcagtacttccgtgatgagagcggcctcaaccgaaagaacatccaagacaaccgagtgcactgctgcctatacttcatctcccccttcgggcatgggctgcggccagtggatgtgggtttcatgaaggcattgcatgagaaggtcaacatcgtgcctctcatcgccaaagctgactgtcttgtccccagtgagatccggaagctgaaggagcggatccgggaggagattgacaagtttgggatccatgtataccagttccctgagtgtgactcggacgaggatgaggacttcaagcagcaggaccgggaactgaaggagagcgcgcccttcgccgttataggcagcaacacggtggtggaggccaaggggcagcgggtccggggccgactgtacccctgggggatcgtggaggtggagaaccaggcgcattgcgacttcgtgaagctgcgcaacatgctcatccgcacgcatatgcacgacctcaaggacgtgacgtgcgacgtgcactacgagaactaccgcgcgcactgcatccagcagatgaccagcaaactgacccaggacagccgcatggagagccccatcccgatcctgccgctgcccaccccggacgccgagactgagaagcttatcaggatgaaggatgaggaactgaggcgcatgcaggagatgctgcagaggatgaagcagcagatgcaggaccagtgacgctcgccgnggacacaccgtccgtctccgggacgccctcgcaccccctggacaccanacnggactgttcccgacccggaanacgcggggnccacagncccccagntgacccctaat

SEQ ID NO: 239 - DNA, 1330 bp, Homo Sapiens
  misc_feature (901)..(901): n is a, c, g, or t
  misc_feature (942)..(942): n is a, c, g, or t
  misc_feature (960)..(960): n is a, c, g, or t
  misc_feature (965)..(965): n is a, c, g, or t
  misc_feature (976)..(976): n is a, c, g, or t
  misc_feature (984)..(984): n is a, c, g, or t
  misc_feature (987)..(987): n is a, c, g, or t
  misc_feature (1248)..(1248): n is a, c, g, or t
cttaagagataacatgagaggatcgcatcaccatcaccatcacggtcgacccacgcgtccgggaacccggcgatatggctgccgctgtgccccgcgccgcatttctctccccgctgcttccccttctcctgggcttcctgctcctctccgctccgcatggcggcagcggcctgcacaccaagggcgcccttcccctggatacggtcactttctacaagattatggtgacaagctgaacatggagctgagtgagaaatacaagctggacaaagagagctacccagtcttctacctcttccgggatggggactttgagaacccagtcccatacactggggcagttaaggttggagccatccagcgctggctgaaggggcaaggggtctacctaggtatgcctggttgcctgcctgtatacgacgccctggccggggagttcatcagggcctctggtgtggaggcccgccaggccctcttgaagcaggggcaagataacctctcaagtgtgaaggagactcagaagaagtgggccgagcaatacctgaagatcatggggaagatcttataccaaggggaggacttcccagcatcagagatgacacggatcgccacgctgatcgaaaagaacaagatgagtgacgggaagaaggaggagctccataatagcttaaacatcctgactgccttccagaaaaaagcggcccacaaataacatctgaaacaagggcgcactgcatctaccaccctacggccaatgcaaaaatccatcgtcatccggcgctactgccaacccaaaaaaattatgcaacacagaaaccttcaggacatcacaacacaacaaccaccctacaacgtgccgccgtcaaaacaacctaaacattaccctcacgccggaccaaantccaaccataccacttcacctaccccaaacaagataacaanaaaccccacacgacactntacancccaccacaanctcccacncanaaatccaaatcatcaccaaccacaacccaccaaccacactcccattttccaccactccccctctctaccaacacaactacaaacatcaacaaacgccaaaccccaccatcccactcaactcccacctccaaccatcccctacaaccacccccaaacaccacacacacccaatacgactttcaacatgacacgcactttttttccttaaaatcacaccaagaacttacactactcctactcaattcactcacctacatgcanctcgacctcaaaccccacccacaaccgcctacatcaacacacccccaccaacatcaattcatcccctctcacaccacatact

SEQ ID NO: 240 - DNA, 1047 bp, Homo Sapiens
  misc_feature (783)..(783): n is a, c, g, or t
  misc_feature (790)..(790): n is a, c, g, or t
  misc_feature (818)..(818): n is a, c, g, or t
  misc_feature (849)..(849): n is a, c, g, or t
  misc_feature (858)..(858): n is a, c, g, or t
  misc_feature (886)..(886): n is a, c, g, or t
  misc_feature (892)..(892): n is a, c, g, or t
  misc_feature (903)..(903): n is a, c, g, or t
  misc_feature (911)..(911): n is a, c, g, or t
  misc_feature (921)..(921): n is a, c, g, or t
  misc_feature (924)..(924): n is a, c, g, or t
  misc_feature (928)..(928): n is a, c, g, or t
  misc_feature (952)..(952): n is a, c, g, or t
  misc_feature (957)..(957): n is a, c, g, or t
  misc_feature (988)..(989): n is a, c, g, or t
  misc_feature (992)..(992): n is a, c, g, or t
  misc_feature (997)..(998): n is a, c, g, or t
  misc_feature (1001)..(1001): n is a, c, g, or t
  misc_feature (1006)..(1006): n is a, c, g, or t
  misc_feature (1011)..(1011): n is a, c, g, or t
  misc_feature (1021)..(1021): n is a, c, g, or t
  misc_feature (1025)..(1026): n is a, c, g, or t
  misc_feature (1028)..(1028): n is a, c, g, or t
  misc_feature (1032)..(1032): n is a, c, g, or t
  misc_feature (1040)..(1040): n is a, c, g, or t
tagagagaattactatgagaggatcgcatcaccatcaccatcacggatcctatttaggtgacactatagaatcgtcgacccacgcgtccggcccgcgccggccccggtgcccacctccgcgccgcgcggaccctccgagcccgcgctcagacgccccagctccgccgagaggccgcttgcgccgggtccttcttccccaaatgcaggcagagcccccggagccatggccagcccttccggcagctccaaagccactggcaagccccgaggcagggatggccggcccaggagggaggaggacgacgtccctcccgaagagaagaggctgcggctcttgctggaggggggaagcgcacagccccaggactgcgaggacggggaggacgcgccgcggccgggcagggaggagaccggcacccagacaggtggcgacggcagaggaaaagcttatagcttcattgcaccatgtgtggcatttgggcgctgtttggcagtgatgattgcctttctgttcagtgtctgagtgctatgaagattgcacacagaggtccagatgcattccgttttgagaatgtcaatggatacaccaactgctgctttggatttcaccggttggcggtagttgacccgctgtttggaatgcagccaattcgagtgaagaaatatccgtatttgtggctctgttacaatggtgaaatctacaaccataaaaagatgcaacagcattttgaatttgaataccagaccaaagtggatggtgaaataatccttcatctttatganaaaggangaattgagcaaacaaatttgtatgttgnatgggggtgtttgcattttgttttactgganactgccaanaaaaaaagtgttcctggggtaaaaaaanacatantggaagtccanaacttttntttttaaagncantganaaaaaaaatggatttttttggctnttatntttcaaaaaacttaaaagggttttttttaannttnaaaannctnccccnaattncctttttttnaaanngnaaancctttttnttttctt

SEQ ID NO: 241 - DNA, 959 bp, Homo Sapiens
aactatgagaggtcgcatcaccatcaccatcacggatcctatttaggtgacactatagaatcgtcgacccacgcgtccgcctccttccatctcatctctatctctgggctggtttgtgagctgaaagagttcacacatacctggggtgggcctctgtctcctcgacagagtgggactgaggagcgaggcctgaagcattactggttcacatcctggcccgaccagaagaccccagaccgggcccccccactcctgcacctggtgcgggaggtggaggaggcagcccagcaggaggggccccactgtgcccccatcatcgtccactgcagtgcagggattgggaggaccggctgcttcattgccaccagcatctgctgccagcagctgcggcaggagggtgtagtggacatcctgaagaccacgtgccagctccgtcaggacaggggcggcatgatccagacatgcgagcagtaccagtttgtgcaccacgtcatgagcctctacgaaaagcagctgtcccaccagtccccagaatgactgcgcttctcctacaaggttctctgggcactgcccagcctgagtctcggccctcacccagggccctgcctcgggtcctgggcctgctccccgcttcctccccttcagtcagctccctctgtcctctgtcagcctggcctgacccctaccctccagcattgctcttcctactgtacatattggggagtggggggcagggtcgggaagggacatgccaggccaggcctggggccccggggcctgacccacaccacgcagaccccgggctccagtttttaacgatggttccatcaatacctgatccagaatgtttccgtgctacactttgtgtcctgctgcaatgtgttctgtctgtccatccatctctgccctctgtaccggacactgtgtctcctcagccaggaaaggggtaatgagctcca

SEQ ID NO: 242 - DNA, 1233 bp, Homo Sapiens
  misc_feature (885)..(885): n is a, c, g, or t
  misc_feature (892)..(892): n is a, c, g, or t
  misc_feature (959)..(959): n is a, c, g, or t
  misc_feature (980)..(980): n is a, c, g, or t
  misc_feature (987)..(987): n is a, c, g, or t
  misc_feature (1004)..(1004): n is a, c, g, or t
  misc_feature (1008)..(1008): n is a, c, g, or t
  misc_feature (1022)..(1022): n is a, c, g, or t
  misc_feature (1032)..(1033): n is a, c, g, or t
  misc_feature (1036)..(1036): n is a, c, g, or t
  misc_feature (1047)..(1047): n is a, c, g, or t
  misc_feature (1054)..(1054): n is a, c, g, or t
  misc_feature (1075)..(1075): n is a, c, g, or t
  misc_feature (1088)..(1088): n is a, c, g, or t
  misc_feature (1095)..(1095): n is a, c, g, or t
  misc_feature (1099)..(1100): n is a, c, g, or t
  misc_feature (1106)..(1106): n is a, c, g, or t
  misc_feature (1138)..(1138): n is a, c, g, or t
  misc_feature (1148)..(1149): n is a, c, g, or t
  misc_feature (1151)..(1152): n is a, c, g, or t
  misc_feature (1159)..(1159): n is a, c, g, or t
  misc_feature (1167)..(1167): n is a, c, g, or t
  misc_feature (1169)..(1169): n is a, c, g, or t
  misc_feature (1179)..(1180): n is a, c, g, or t
  misc_feature (1185)..(1185): n is a, c, g, or t
  misc_feature (1196)..(1196): n is a, c, g, or t
  misc_feature (1203)..(1204): n is a, c, g, or t
  misc_feature (1210)..(1210): n is a, c, g, or t
  misc_feature (1212)..(1212): n is a, c, g, or t
  misc_feature (1220)..(1221): n is a, c, g, or t
  misc_feature (1225)..(1225): n is a, c, g, or t
gagaaattaactatgagaggatcgcatcaccatcaccatcacggatcctatttaggtgacactatagaatcgtcgacccacgcgtccggctgccggcaggacctttctctcgctgccgctgggaccccgtgtcatcgcccaggccgagcacggaaatctactttcttcaatgtgttaaccaatagtcaggcttcagcagaaaacttcccgttctgcactattgatcctaatgagagcagagtacctgtgccagatgaaaggtttgactttctttgtcaataccacaaaccagcaagcaaaattcctgcctttctaaatgtggtggatattgctggccttgtgaaaggagctcacaatgggcagggcctggggaatgcttttttatctcatattagtgcctgtgatggcatctttcatctaacacgtgcttttgaagatgatgatatcacgcacgttgaaggaagtgtagatcctattcgagatatagaaataatacatgaagagcttcagcttaaagatgaggaaatgattgggcccattatagataaactagaaaaggtggctgtgagaggaggagataaaaaactaaaacctgaatatgatataatgtgcaaagtaaaatcctgggttatagatcaaaagaaacctgttcgcttctatcatgattggaatgacaaagagattgaagtgttgaataaacacttatttttgacttcaaaaccaatggtctacttggttaatctttctgaaaaagactacattagaaagaaaaacaaatggttgataaaaattaaagagtgggtggacaagtatgacccaggtgctttggtcattccttttagtggggccttggaactcaagttgcaagaattgagtgctgagganaagacanaagtatctggaagcgaacatgacacaaagtgctttgccaaaatcattaaggctggggttgcagcacnccaactaaaaaacttttttcnctgcagncccaaatgaaagtgcgngctnggaccctcaggaanggactaaggnnccnccaggctggcnggaaaanatccccccagattttgaaaangggattccttatnggctganttanngaaatnccaaaattttaaaaaggaaggtcctgaaatgncattccaggnngnnggaaatncaaaacananggcaaaattnnttggngaaaaggaaantttcttnncaattnancccccccnnccgnaaaaaaaa

SEQ ID NO: 243 - DNA, 944 bp, Homo Sapiens
tatgagaggatcgcatcaccatcaccatcacggatcctatttaggtgacactatagaatcgtcgacccacgcgtccgggaattccagatggtcaaataaaaaaaatgttcctaaacttggtgatatgaattcatcatttgaagatgtagatatattttattctttctggtataattttgattcttggagagaattttcttatttagatgaagaagaaaaagaaaaagcagaatgtcgtgatgagaggagatggattgaaaagcagaacagagcaacaagagcacaaagaaaaaaagaagaaatgaacagaataagaacattagttgacaatgcatacagctgtgatccaaggataaaaaagttcaaggaagaagaaaaagccaagaaagaagcagaaaagaaagcaaaagcagaagctaaacggaaggagcaagaagctaaagaaaaacaaagacaagctgaattagaagctgctcggttagctaaggagaaagaagaggaggaagtcagacagcaagcattgctggcaaagaaggaaaaagatatccagaaaaaagccattaagaaggaaaggcaaaaacttcgaaactcatgcaagacctggaatcatttttctgataatgaggcagagcgggttaaaatgatggaagaagtggaaaaactttgtgatcggcttgaactggcaagcttacagtgcttgaatgaaacactcacatcatgcacaaaagaagtaggaaaggctgctttggaaaaacagatagaagaaataaatgagcaaatcagaaaagagaaagaggaagctgaggctcgtatgcgacaagcatctaagaacacagagaaatcaactggtggaggtggaaatggaagtaaaaattggtcagaagatgatctacaattactaattaaagctgtgaatctgttccctgctggaacaaattcagatg

SEQ ID NO: 244 - DNA, 811 bp, Homo Sapiens
atgagaggatcgcatcaccatcaccatcacggatcctatttaggtgacactatagaatcgtcgacccacgcgtccggtcgagttgcttggcggtcgtggttccggaggttcctcgggatgtcggtggccttcgtaccggactggctgaggggcaaggcggaagtcaatcaagagactatccagcggctccttgaggagaatgaccagctgatccgctgtattgtggagtatcagaacaagggccgcgggaacgagtgcgtgcagtaccagcatgtgttacatagaaatctcatttatttggctaccattgcagatgccagtccaaccagcacttcaaaagcaatggaataatctttcaaaagcaatagaataatcttccatttggctgtcgtgaggagtaattgaatgtaatccatctcttacaaaatggagacagggtctttaccaactcaactggttaaaacatgaatgaaacctctgtggctctttcgaaacgtgaaaatgtgaagaaagctactaacttagctgtattctcatgtaaatattttttaaataattaagcaaatccctcaataagttgagcccaggtgtcctctttcctgaacttggagcatgtttggataacaaagacatcactgggatgttcaagtctactttttagtttcaacctgaagaggaaactcagtaggtgttgggcaggaattggtgagattcctgacttgataccttgctaaatggacatgtaactgtgtgctccttcctatcagtttgtaaatgtggtccccctgactgctgttttcagattgctttg

SEQ ID NO: 245 - DNA, 962 bp, Homo Sapiens
  misc_feature (879)..(879): n is a, c, g, or t
  misc_feature (907)..(907): n is a, c, g, or t
  misc_feature (916)..(916): n is a, c, g, or t
  misc_feature (919)..(919): n is a, c, g, or t
  misc_feature (922)..(922): n is a, c, g, or t
  misc_feature (951)..(951): n is a, c, g, or t
  misc_feature (955)..(955): n is a, c, g, or t
  misc_feature (960)..(960): n is a, c, g, or t
atagagaaatactatgagaggatcgcatcaccatcaccatcacggatcctatttaggtgacactatagaatcgtcgacccacgcgtccgccatcacgagtgccgccagcatgtctgacaaactgccctacaaagtcgccgacatcggcctggctgcctggggacgcaaggccctggacattgctgagaacgagatgccgggcctgatgcgtatgcgggagcggtactcggcctccaagccactgaagggcgcccgcatcgctggctgcctgcacatgaccgtggagacggccgtcctcattgagaccctcgtcaccctgggtgctgaggtgcagtggtccagctgcaacatcttctccacccaggaccatgcggcggctgccattgccaaggctggcattccggtgtatgcctggaagggcgaaacggacgaggagtacctgtggtgcattgagcagaccctgtacttcaaggacgggcccctcaacatgattctggacgacgggggcgacctcaccaacctcatccacaccaagtacccgcagcttctgccaggcatccgaggcatctctgaggagaccacgactggggtccacaacctctacaagatgatggccaatgggatcctcaaggtgcctgccatcaatgtcaatgactccgtcaccaagagcaagtttgacaacctctatggctgccgggagtccctcatagatggcatcaagcgggccacagatgtgatgattgccggcaaggtagcggtggtagcaggctatggtgatgtgggcaagggctgtgcccaggccctgcggggttttcggagcccgcgtcatcatcaccgagattgaccccatcaacgcactgcaggctgccatggaagggnttatgaggtgaccaccatggatgaggcntgtcagganggnaanattttttgtcaccaccacagggttgtatngacntcatncc

SEQ ID NO: 246 - DNA, 1120 bp, Homo Sapiens
  misc_feature (7)..(7): n is a, c, g, or t
  misc_feature (68)..(68): n is a, c, g, or t
  misc_feature (737)..(737): n is a, c, g, or t
  misc_feature (830)..(830): n is a, c, g, or t
  misc_feature (847)..(847): n is a, c, g, or t
  misc_feature (890)..(890): n is a, c, g, or t
  misc_feature (892)..(892): n is a, c, g, or t
  misc_feature (909)..(909): n is a, c, g, or t
  misc_feature (914)..(914): n is a, c, g, or t
  misc_feature (926)..(926): n is a, c, g, or t
  misc_feature (950)..(950): n is a, c, g, or t
  misc_feature (961)..(962): n is a, c, g, or t
  misc_feature (986)..(986): n is a, c, g, or t
  misc_feature (997)..(997): n is a, c, g, or t
  misc_feature (1010)..(1010): n is a, c, g, or t
  misc_feature (1029)..(1030): n is a, c, g, or t
  misc_feature (1039)..(1039): n is a, c, g, or t
  misc_feature (1042)..(1042): n is a, c, g, or t
  misc_feature (1047)..(1047): n is a, c, g, or t
  misc_feature (1050)..(1050): n is a, c, g, or t
  misc_feature (1052)..(1052): n is a, c, g, or t
  misc_feature (1057)..(1057): n is a, c, g, or t
  misc_feature (1064)..(1065): n is a, c, g, or t
  misc_feature (1069)..(1069): n is a, c, g, or t
  misc_feature (1074)..(1074): n is a, c, g, or t
  misc_feature (1078)..(1078): n is a, c, g, or t
  misc_feature (1080)..(1080): n is a, c, g, or t
  misc_feature (1083)..(1083): n is a, c, g, or t
  misc_feature (1088)..(1088): n is a, c, g, or t
  misc_feature (1103)..(1103): n is a, c, g, or t
  misc_feature (1107)..(1107): n is a, c, g, or t
  misc_feature (1112)..(1112): n is a, c, g, or t
tagaganattactatgagaggatcgcatcaccatcaccatcacggatcctatttaggtgacactatanaatcgtcgacccacgcgtccggcccagcccgccggtccacgccgcgcaccgctccgagggccagcgccacccgctccgcagccggcaccatgcgcgagatcgtgcacatccaggcgggccagtgcggcaaccagatcggcgccaagttttgggaggtcatcagcgatgagcatgggatcgaccccacaggcagttaccatggagacagtgacttgcagctggagagaatcaacgtgtactacaatgaggctgctggtaacaaatatgtacctcgggccatcctggtggatctggagcctggcaccatggactctgtcaggtctggacccttcggccagatcttcagaccagacaacttcgtgttcggccagagtggagccgggaataactgggccaagggccactacacagagggagccgagctggtcgactcggtcctggatgtggtgaggaaggagtcagagagctgtgactgtctccagggcttccagctgacccactctctggggggcggcacggggtccgggatgggcaccctgctcatcagcaagatccgggaagagtacccagaccgcatcatgaacaccttcagcgtcatgccctcacccaaggtgtcagacacggtggtggagccctacaacgccaccctctctgtccaccagctggtgnaaaacacagatgaaacctactccattgataacgaggccctgtatgacatctgcttccgcaccctgaagctgaccacccccacctacggggacntcaaccacctggtgtcngccaccatgagcgggggtcaccacctgcctgcgcttcccgggncnagctgaaacgcaaaacntgcgncaagctggcggngaacatggtgccctttccctcgcntgcactttttnntgcccggcttcgcgccccttgacnagccggggcangccagcaattacngggcgcctcacggtgcccnnagctccccnacnaaatnttncnattcnaaaaaanngatnggccncctngnaancccgngccaagggccgcttncttnaaggnggttgcca

SEQ ID NO: 247 - DNA, 828 bp, Homo Sapiens
  misc_feature (1)..(1): n is a, c, g, or t
  misc_feature (362)..(362): n is a, c, g, or t
  misc_feature (596)..(596): n is a, c, g, or t
  misc_feature (600)..(601): n is a, c, g, or t
  misc_feature (606)..(606): n is a, c, g, or t
  misc_feature (610)..(611): n is a, c, g, or t
  misc_feature (620)..(620): n is a, c, g, or t
  misc_feature (681)..(681): n is a, c, g, or t
  misc_feature (698)..(698): n is a, c, g, or t
  misc_feature (701)..(701): n is a, c, g, or t
  misc_feature (709)..(709): n is a, c, g, or t
  misc_feature (756)..(756): n is a, c, g, or t
  misc_feature (786)..(786): n is a, c, g, or t
  misc_feature (801)..(802): n is a, c, g, or t
  misc_feature (805)..(805): n is a, c, g, or t
  misc_feature (811)..(812): n is a, c, g, or t
  misc_feature (818)..(818): n is a, c, g, or t
  misc_feature (823)..(824): n is a, c, g, or t
nactatgagaggatcgcatcaccatcaccatcacggatcctatttaggtgacactatagaatcgtcgacccacgcgtccggagcgccgcacctacaccagccaacccagatcccgaggtccgacagcgcccggcccagatccccacgcctgccaggagcaagccgagagccagccggccggcgcactccgactccgagcagtctctgtccttcgacccgagccccgcgccctttccgggacccctgccccgcgggcagcgctgccaacctgccggccatggagaccccgtcccagcggcgcgccacccgcagcggggcgcaggccagctccactccgctgtcgcccacccgcatcacccggntgcaggagaaggaggacctgcaggagctcaatgatcgcttggcggtctacatcgaccgtgtgcgctcgctggaaacggagaacgcagggctgcgccttcgcatcaccgagtctgaagaggtggtcagccgcgaggtgtccggcatcaaggccgcctacgaggccgagctcggggatgcccgcaagacccttgactcagtagccaagggagcgcgcccgccctgcagctggaggntgannaaagngcgnnaggagtttnaaggagctgaaagcgcgcaataccaagaaggagggtgacctgatagctgctcaggttcggntgaaggaccctggaagnctntgctgaantccaagggaggccggccttgaagcattgtttctcagtgaaaaagcgnacgcttggaggggcaaaatttcattgaatntgggggggccaaggnnggnccaaannttggangggannccct

SEQ ID NO: 248 - DNA, 937 bp, Homo Sapiens
tatgagaggtcgcatcaccatcaccatcacggatcctatttaggtgacactatagaatcgtcgacccacgcgtccgctctgaaggcagggaagactcgaaccttttatggtctgcatcaggacttccccagcgtggtgctagttggcctcggcaaaaaggcagctggaatcgacgaacaggaaaactggcatgaaggcaaagaaaacatcagagctgctgttgcagcggggtgcaggcagattcaagacctggagctctcgtctgtggaggtggatccctgtggagacgctcaggctgctgcggagggagcggtgcttggtctctatggaagtggggatcaggaggcctggcagaaaggagtcctgtttgcttctgggcagaacttggcacgccaattgatggagacgccagccaatgagatgacgccaaccagatttgccgaaattattgagaagaatctcaaaagtgctagtagtaaaaccgaggtccatatcagacccaagtcttggattgaggaacaggcaatgggatcattcctcagtgtggccaaaggatctgacgagcccccagtcttcttggaaattcactacaaaggcagccccaatgcaaacgaaccacccctggtgtttgttgggaaaggaattacctttgacagtggtggtatctccatcaaggcttctgcaaatatggacctcatgagggctgacatgggaggagctgcaactatatgctcagccatcgtgtctgctgcaaagcttaatttgcccattaatattataggtctggcccctctttgtgaaaatatgcccagcggcaaggccaacaagccgggggatgttgttagagccaaaaacgggaagaccatccaggttgataacactgatgctgaggggaggctcatactggctgatgcgctctgttacgcacacacgttta

SEQ ID NO: 249 - DNA, 840 bp, Homo Sapiens
  misc_feature (3)..(3): n is a, c, g, or t
  misc_feature (735)..(735): n is a, c, g, or t
  misc_feature (787)..(787): n is a, c, g, or t
  misc_feature (794)..(796): n is a, c, g, or t
  misc_feature (802)..(803): n is a, c, g, or t
  misc_feature (813)..(815): n is a, c, g, or t
  misc_feature (818)..(818): n is a, c, g, or t
  misc_feature (834)..(835): n is a, c, g, or t
  misc_feature (838)..(839): n is a, c, g, or t
ttnagaggagaattaactatgagaggatcgcatcaccatcaccatcacggatcctatttaggtgacactatagaatcgtcgacccacgcgtccgccaccctccagatcaatgatgagaccgagctggaggccctgtgcgctgagatcgcctcccagcacctggccacggagagccctgacagccccaacaagccctgctgcaggttcacctacctgaccatgacgggcgaggaggtggagctgtgcagccggggccggcacatccttgtggcgtgggagaacaaggacatctacgcggcagccatccggagcctgcggctgcgggagctgcagaatgtggagtgcgtgacggccgtgcgggccggcctgggctccatcatccccctgcagctgctgaccatgctcagcccactggagatggagctgcgcacctgcggcctcccctacatcaacctcgagttcctcaaggcccacaccatgtaccaagtggggctgatggagacggaccagcacatcgagttcttctggggggccctggagatgttcacccaggaggagctgtgcaagttcatcaagtttgcctgcaaccaggagcgcatcccgttcacctgcccctgcaaaagatgggggtccccgacactgcccatgtgcccccgtaccccatgaaaatcgcccccccagatggcacagcaggttcccccagactctcgctacatcccgcgtggagaacctggnatggttcatgatcaagcttcccccagtactccctctctggaaatcatgctgnaaaaaannnttcgtnngggccattcnnntancggggaaaaacccccnncanng

SEQ ID NO: 250 - DNA, 859 bp, Homo Sapiens
  misc_feature (4)..(4): n is a, c, g, or t
  misc_feature (663)..(663): n is a, c, g, or t
  misc_feature (669)..(669): n is a, c, g, or t
  misc_feature (675)..(675): n is a, c, g, or t
  misc_feature (714)..(714): n is a, c, g, or t
  misc_feature (717)..(717): n is a, c, g, or t
  misc_feature (723)..(723): n is a, c, g, or t
  misc_feature (773)..(773): n is a, c, g, or t
  misc_feature (778)..(778): n is a, c, g, or t
  misc_feature (782)..(782): n is a, c, g, or t
  misc_feature (791)..(791): n is a, c, g, or t
  misc_feature (796)..(796): n is a, c, g, or t
  misc_feature (808)..(808): n is a, c, g, or t
  misc_feature (818)..(818): n is a, c, g, or t
  misc_feature (826)..(826): n is a, c, g, or t
  misc_feature (834)..(834): n is a, c, g, or t
  misc_feature (849)..(849): n is a, c, g, or t
tganaggatcgcatcaccatcaccatcacggatcctatttaggtgacactatagaatcgtcgacccacgcgtccgctgaggtgttggaatttggagtgcctctgctacgggcagctgcttgggagctctggcccaaggaacaacagatagctctgcaccttgaatgtgcctgctttctccaagttttggcctgccgctgtgggagctgccatggaggagactttgtcccctttcatcattttgcagtttgttctactaagaattccaaggggacctctcgattctgtacttacagagatactggctcagtgctaacacaagtgatcacagaaaaattgcagctgccttctccccaagaacagaggaagagttcctagatcaagtgaagaggaagctggctcagaccagccctgagaaagacctgttgaccacaaagccttgtcactgtaaggatatcctgaagttagtgctcttacccctcacccagcattgcttggtcgttggagaaaccacctgtgcattttattacctgctggaggctgcggctgcctgcttggacctgtcagataattatatggtctgtttcaacatgggacgtatcactttagccaaaaaatttggctaggaaagcccttcgactgctgaaaaggaatttcccttggncctggnttgggngtccctttttccaaaaaatttcttggaaaaaggattggncanttcctngtacccctgaagcccaacccttccaaaacggaccccttatacctggaaanggagnttcnttccttccncaaangggggggaaccntgccccttgntcttaatncaccaagngggggttattcctgnagccttaaag

SEQ ID NO: 251 - DNA, 923 bp, Homo Sapiens
catcaccatcaccatcacggatcctatttaggtgacactatagaatcgtcgacccacgcgtccgagatgaaggccttagctgttgaaggaaaacgaattggaaaggtgcttgacaatgctattgaaacagaaaaaatgattgaaaagtatgaatcacttgcctctgaccttctggaatggattgaacaaaccatcatcattctgaacaatcgcaaatttgccaattcactggtcggggttcaacagcagcttcaggcattcaacacttaccgcactgtggagaaaccacccaaatttactgagaaggggaacttggaagtgctgctcttcaccattcagagcaagatgagggccaacaaccagaaggtctacatgccccgggaggggaagctcatctctgacatcaacaaggcctgggaaagactggaaaaagcggaacacgaaagagaactggctttgcggaatgagctcataagacaggagaaactggaacagctcgcccgcagatttgatcgcaaggcagctatgagggagacttggctgagcgaaaaccagcgtctggtgtctcaggacaactttgggtttgaccttcctgcagttgaggccgccacaaaaaagcacgaggccattgagacagacattgccgcatacgaggagcgtgtgcaggctgtggtagccgtggccagggagctcgaggccgagaattaccacgacatcaagcgcatcacagcgaggaaggacaatgtcatccggctctgggaatacctactggaactgctcagggcccggagacagcggctcgagatgaacctggggctgcagaagatattccaggaaatgctctacattatggactggatggatgaaatgaaaggtgctagtattgtctcaagactatggcaaacacttacttggtgtggaag

SEQ ID NO: 252 - DNA, 1240 bp, Homo Sapiens
  misc_feature (866)..(866): n is a, c, g, or t
  misc_feature (887)..(887): n is a, c, g, or t
  misc_feature (892)..(892): n is a, c, g, or t
  misc_feature (894)..(894): n is a, c, g, or t
  misc_feature (903)..(903): n is a, c, g, or t
  misc_feature (914)..(914): n is a, c, g, or t
  misc_feature (916)..(917): n is a, c, g, or t
  misc_feature (919)..(919): n is a, c, g, or t
  misc_feature (921)..(921): n is a, c, g, or t
  misc_feature (928)..(928): n is a, c, g, or t
  misc_feature (951)..(951): n is a, c, g, or t
  misc_feature (953)..(953): n is a, c, g, or t
  misc_feature (958)..(958): n is a, c, g, or t
  misc_feature (973)..(973): n is a, c, g, or t
  misc_feature (980)..(980): n is a, c, g, or t
  misc_feature (994)..(994): n is a, c, g, or t
  misc_feature (1002)..(1002): n is a, c, g, or t
  misc_feature (1011)..(1011): n is a, c, g, or t
  misc_feature (1016)..(1016): n is a, c, g, or t
  misc_feature (1036)..(1036): n is a, c, g, or t
  misc_feature (1045)..(1045): n is a, c, g, or t
  misc_feature (1050)..(1050): n is a, c, g, or t
  misc_feature (1054)..(1054): n is a, c, g, or t
  misc_feature (1063)..(1063): n is a, c, g, or t
  misc_feature (1067)..(1067): n is a, c, g, or t
  misc_feature (1079)..(1079): n is a, c, g, or t
  misc_feature (1086)..(1086): n is a, c, g, or t
  misc_feature (1096)..(1096): n is a, c, g, or t
  misc_feature (1098)..(1098): n is a, c, g, or t
  misc_feature (1109)..(1109): n is a, c, g, or t
  misc_feature (1111)..(1111): n is a, c, g, or t
  misc_feature (1124)..(1124): n is a, c, g, or t
  misc_feature (1126)..(1126): n is a, c, g, or t
  misc_feature (1141)..(1142): n is a, c, g, or t
  misc_feature (1162)..(1163): n is a, c, g, or t
  misc_feature (1165)..(1165): n is a, c, g, or t
  misc_feature (1175)..(1175): n is a, c, g, or t
  misc_feature (1180)..(1182): n is a, c, g, or t
  misc_feature (1193)..(1193): n is a, c, g, or t
  misc_feature (1214)..(1214): n is a, c, g, or t
  misc_feature (1220)..(1221): n is a, c, g, or t
  misc_feature (1231)..(1231): n is a, c, g, or t
  misc_feature (1234)..(1234): n is a, c, g, or t
agagaaattactatgagaggatcgcatcaccatcaccatcacggatcctatttaggtgacactatagaatcgtcgacccacgcgtccgcgcccctgaggacggttgacggctcccccatgatgaaggcagtggtccatgctgtggacggcaccgccgagaacgggatccaccccctgagctcctccgaggtggacgaactcatccacaaagcggacgaggtcacgctgagcgaggcagggtccacggccggggcggcagagacccggggggctgtggagggggcagcccggaccacgccctcccggcgggagatcaccggtgtgcaggcacagccaggcgaggccacgtccggcccgccggggatccagcccggccaggagcccccggtcacaatgatcttcatgggttaccagaacgtggaggatgaggccgagaccaagaaggtgctgggccttcaagataccatcacggcggagctggtggtcatcgaagacgcggctgagcccaaggagcctgcaccacccaacggcagtgctgccgagcctcccacggaggccgcctccagggaagagaatcaggcggggcccgaggccaccaccagcgacccccaggacctcgacatgaagaagcaccgttgtaaatgctgctccatcatgtgagccggcccccgagaccccggcccccaccccacaccacagacacccaccagcccggcccctcccggcgcctgcccaccctccacccacagcctcacgggtccaggacttggcgtgttgttacatgttccttccgagttttctttcgctggaaagagggacaggggcccccacccgtcaccacgccccaacactcccccgaaccaaanccgtgcacttgtgcctggtangaaananacaggacanacccgcttttncnnananaaggacncccatgtcacggcaagcttcaanangcggntcgcgcccaccgggntcttggngggtgggaacccgnggcctcangcggcccangccancctgccaccttttgggcctntactgtgcnttttnttangggaaaccncccnaaaaaggccccnggaaccnggggtgggtntngagccttttcngncctgaaattaagntntttgggttttctggnnaagggcttggccccccaatnnangatttggggnaggcnnnctttttggggntaaagttttggggaaaaaagncccttnntggccctttnccngggggc

SEQ ID NO: 253 - DNA, 1282 bp, Homo Sapiens
  misc_feature (4)..(4): n is a, c, g, or t
  misc_feature (19)..(19): n is a, c, g, or t
  misc_feature (80)..(80): n is a, c, g, or t
  misc_feature (94)..(94): n is a, c, g, or t
  misc_feature (884)..(884): n is a, c, g, or t
  misc_feature (935)..(935): n is a, c, g, or t
  misc_feature (978)..(978): n is a, c, g, or t
  misc_feature (994)..(994): n is a, c, g, or t
  misc_feature (996)..(996): n is a, c, g, or t
  misc_feature (1006)..(1006): n is a, c, g, or t
  misc_feature (1008)..(1008): n is a, c, g, or t
  misc_feature (1018)..(1018): n is a, c, g, or t
  misc_feature (1037)..(1037): n is a, c, g, or t
  misc_feature (1057)..(1057): n is a, c, g, or t
  misc_feature (1060)..(1060): n is a, c, g, or t
  misc_feature (1096)..(1096): n is a, c, g, or t
  misc_feature (1105)..(1105): n is a, c, g, or t
  misc_feature (1108)..(1108): n is a, c, g, or t
  misc_feature (1115)..(1115): n is a, c, g, or t
  misc_feature (1123)..(1123): n is a, c, g, or t
  misc_feature (1126)..(1127): n is a, c, g, or t
  misc_feature (1130)..(1130): n is a, c, g, or t
  misc_feature (1145)..(1145): n is a, c, g, or t
  misc_feature (1147)..(1147): n is a, c, g, or t
  misc_feature (1150)..(1151): n is a, c, g, or t
  misc_feature (1155)..(1155): n is a, c, g, or t
  misc_feature (1162)..(1162): n is a, c, g, or t
  misc_feature (1178)..(1178): n is a, c, g, or t
  misc_feature (1181)..(1181): n is a, c, g, or t
  misc_feature (1187)..(1187): n is a, c, g, or t
  misc_feature (1190)..(1190): n is a, c, g, or t
  misc_feature (1195)..(1195): n is a, c, g, or t
  misc_feature (1201)..(1202): n is a, c, g, or t
  misc_feature (1205)..(1205): n is a, c, g, or t
  misc_feature (1214)..(1214): n is a, c, g, or t
  misc_feature (1216)..(1216): n is a, c, g, or t
  misc_feature (1223)..(1223): n is a, c, g, or t
  misc_feature (1232)..(1232): n is a, c, g, or t
  misc_feature (1237)..(1237): n is a, c, g, or t
  misc_feature (1239)..(1239): n is a, c, g, or t
  misc_feature (1249)..(1249): n is a, c, g, or t
  misc_feature (1253)..(1253): n is a, c, g, or t
  misc_feature (1263)..(1263): n is a, c, g, or t
  misc_feature (1268)..(1269): n is a, c, g, or t
gatngaggaaaattactangagagggatgcatcaccatcaccatcacggatcctattttagggtgacactatagaatcgntcgacccacgccgntccgagaccggccggggaagacattgccaatctagctgatgaattcaaggatcacttggtgcctgaccctggctgccattatgaccaactaattgaaattaacctcagtgagctgaagccacacatcaatgggcccttcacccctgacctggctcaccctgtggcagaagtgggcaaggtggcagagaaggaaggatggcctctggacatccgagtgggtctaattggtagctgcaccaattcaagctatgaagatatggggcgctcagcagctgtggccaagcaggcactggcccatggcctcaagtgcaagtcccagttcaccatcactccaggttccgagcagatccgcgccaccattgagcgggacggctatgcacagatcttgagggatctgggtggcattgtcctggccaatgcttgtggcccctgcattggccagtgggacaggaaggacatcaagaagggggagaagaacacaatcgtcacctcctacaacaggaacttcacgggccgcaacgacgcaaaccccgagacccatgcctttgtcacgtccccagagattgtcacagccctggccattgcgggaaccctcaagttcaacccagagaccgactacctgacgggcacggatggcaagaagttcaggctggaggctccggatgcagatgagcttcccaaaggggagtttgacccagggcaggacacctaccagcacccacccaaggacagcagcgggcagcatgtggacgtgagccccaccagccagcgcctgcagctcctggagccnttttgacaagtgggatggcaaggacctggaggacctgcaaatcctcatcanggtcaaagggaagtgtaccactgaccacatctcagctgctggncccctggctcagttcngngggcctttgnanaacatctccnacaaacctggctcattggngcccatcaacattgaaaaanggnaaggccaactccgtgggcaatgccgtccctcagaantttggcccngtncctgaanctggcccnctnntanaaaaaaaattggcancnggnngggnggggatnggaaaaaaaaaattanggngaaggntcnaaccnggaacnngcnctcttgaancnccccccnttgggggcnggccntntccccaaaantttnccggatcccnaaacnncctgaaaaaaggg

SEQ ID NO: 254 - DNA, 1199 bp, Homo Sapiens
  misc_feature (904)..(904): n is a, c, g, or t
  misc_feature (917)..(917): n is a, c, g, or t
  misc_feature (936)..(936): n is a, c, g, or t
  misc_feature (957)..(957): n is a, c, g, or t
  misc_feature (960)..(960): n is a, c, g, or t
  misc_feature (969)..(969): n is a, c, g, or t
  misc_feature (983)..(983): n is a, c, g, or t
  misc_feature (988)..(988): n is a, c, g, or t
  misc_feature (990)..(990): n is a, c, g, or t
  misc_feature (994)..(994): n is a, c, g, or t
  misc_feature (1007)..(1007): n is a, c, g, or t
  misc_feature (1013)..(1013): n is a, c, g, or t
  misc_feature (1022)..(1022): n is a, c, g, or t
  misc_feature (1040)..(1040): n is a, c, g, or t
  misc_feature (1066)..(1066): n is a, c, g, or t
  misc_feature (1069)..(1069): n is a, c, g, or t
  misc_feature (1082)..(1083): n is a, c, g, or t
  misc_feature (1089)..(1089): n is a, c, g, or t
  misc_feature (1093)..(1093): n is a, c, g, or t
  misc_feature (1108)..(1108): n is a, c, g, or t
  misc_feature (1110)..(1110): n is a, c, g, or t
  misc_feature (1118)..(1118): n is a, c, g, or t
  misc_feature (1121)..(1121): n is a, c, g, or t
  misc_feature (1131)..(1132): n is a, c, g, or t
  misc_feature (1137)..(1137): n is a, c, g, or t
  misc_feature (1141)..(1141): n is a, c, g, or t
  misc_feature (1148)..(1148): n is a, c, g, or t
  misc_feature (1150)..(1151): n is a, c, g, or t
  misc_feature (1156)..(1156): n is a, c, g, or t
  misc_feature (1163)..(1163): n is a, c, g, or t
  misc_feature (1166)..(1166): n is a, c, g, or t
  misc_feature (1175)..(1175): n is a, c, g, or t
  misc_feature (1186)..(1186): n is a, c, g, or t
  misc_feature (1188)..(1188): n is a, c, g, or t
  misc_feature (1194)..(1194): n is a, c, g, or t
  misc_feature (1197)..(1197): n is a, c, g, or t
attagagaaaattactatgagaggatcgcatcaccatcaccatcacggatcctatttaggtgacactatagaatcgtcgacccacgcgtccgcaactgaagaagaaattcaggaaatctgcttaaagatcttgcagctttatgctcggaaaaaggttgatctcacacacctggagggtgaagtggaaaaaagaaagcacgctatcgaagaggcaaaggcccaagcccggggcctgttgcctgggggcacacaggtgctggatggtacctcggggttctctcctgcccccaagctggtggaatcccccaaagaaggtaaagggagcaagccttccccactgtctgtgaagaacaccaagaggaggctggagggcgccaagaaagccaaggcggacagccccgtgaacggcttgccaaaggggcgagagagtcggagtcggagccggagccgtgagcagagctactcgaggtccccatcccgatcagcgtctcctaagaggaggaaaagtgacagcggctccacatctggtgggtccaagtcgcagagccgctcccggagcaggagtgactccccaccgagacaggccccccgcagcgctccctacaaaggctctgagattcggggctcccggaagtccaaggactgcaagtacccccagaagccacacaagtctcggagccggagttcttcccgttctcgaagcaggtcacgggagcgggcggataatccgggaaaatacaagaagaaaagtcattactacagagatcagcgacgagagcgctcgaggtcgtatgaacgcacaggccgtcgctatgagcgggaccaccctgggcacagcagggcatcggaggtgaggcggggttgcagtgactgggtggccgcagcccttccctggggaagtacntgatggctgcccntttgacccccggtggctgnccctttgacccccggggtgtngcntcttcaccncaaagtgggtcctnaaaanangaanttcctttttttgnaaattnttttgttcnaacttggaaaccttgggngggaattttggaaaattgggaaattnganggggaaccgggtnnaaaccnttgnttttcaaaaccgggntnctgggggnttncgggcccaannccttngggnccccgtngnnagggnttctaanttntgggaaacnatcttttttgnangggccnccntc

SEQ ID NO: 255 - DNA, 823 bp, Homo Sapiens
  misc_feature (4)..(4): n is a, c, g, or t
  misc_feature (649)..(649): n is a, c, g, or t
  misc_feature (766)..(766): n is a, c, g, or t
  misc_feature (790)..(790): n is a, c, g, or t
  misc_feature (795)..(795): n is a, c, g, or t
  misc_feature (799)..(799): n is a, c, g, or t
  misc_feature (809)..(809): n is a, c, g, or t
tganaggatcgcatcaccatcaccatcacggatcctatttaggtgacactatagaatcgtcgacccacgcgtccgggaaactgaaggagctggaggtggccgagggcggcaaggcagagctggagcgcctgcaggccgaggcacagcagctgcgcaaggaggagcggagctgggagcagaagctggaggagatgcgcaagaaggagaagagcatgccctggaacgtggacacgctcagcaaagacggcttcagcaagagcatggtaaataccaagcccgagaagacggaggaggactcagaggaggtgagggagcagaaacacaagaccttcgtggaaaaatacgagaaacagatcaagcactttggcatgcttcgccgctgggatgacagccaaaagtacctgtcagacaacgtccacctggtgtgcgaggagacagccaattacctggtcatttggtgcattgacctagaggtggaggagaaatgtgcactcatggagcaggtggcccaccagacaatcgtcatgcaatttatcctggagctggccaagagcctaaaggtggacccccgggcctgcttccggcagttcttcactaagataaagacagccgatcgccagtacatggagggcttcaacgacgagctggnagccttcaaggagcgtgtgcggggccgtgccaagctgcgcatcgagaaggccatgaaggagtacgaggaggaggagcgcaagaagcgggttcggccccggcggcctggaccccgttngaggtctacgagtccctccctgangaacnccanaagtgcttcnatgtgaaggacgtg

SEQ ID NO: 256 - DNA, 840 bp, Homo Sapiens
  misc_feature (1)..(1): n is a, c, g, or t
  misc_feature (58)..(58): n is a, c, g, or t
  misc_feature (63)..(63): n is a, c, g, or t
  misc_feature (236)..(236): n is a, c, g, or t
  misc_feature (253)..(253): n is a, c, g, or t
  misc_feature (391)..(391): n is a, c, g, or t
  misc_feature (394)..(394): n is a, c, g, or t
  misc_feature (397)..(397): n is a, c, g, or t
  misc_feature (511)..(511): n is a, c, g, or t
  misc_feature (528)..(528): n is a, c, g, or t
  misc_feature (613)..(613): n is a, c, g, or t
  misc_feature (625)..(625): n is a, c, g, or t
  misc_feature (653)..(653): n is a, c, g, or t
  misc_feature (656)..(656): n is a, c, g, or t
  misc_feature (659)..(659): n is a, c, g, or t
  misc_feature (661)..(661): n is a, c, g, or t
  misc_feature (663)..(663): n is a, c, g, or t
  misc_feature (676)..(676): n is a, c, g, or t
  misc_feature (679)..(679): n is a, c, g, or t
  misc_feature (682)..(682): n is a, c, g, or t
  misc_feature (690)..(690): n is a, c, g, or t
  misc_feature (693)..(693): n is a, c, g, or t
  misc_feature (712)..(712): n is a, c, g, or t
  misc_feature (730)..(730): n is a, c, g, or t
  misc_feature (737)..(737): n is a, c, g, or t
  misc_feature (739)..(739): n is a, c, g, or t
  misc_feature (744)..(744): n is a, c, g, or t
  misc_feature (746)..(746): n is a, c, g, or t
  misc_feature (749)..(749): n is a, c, g, or t
  misc_feature (762)..(762): n is a, c, g, or t
  misc_feature (764)..(764): n is a, c, g, or t
  misc_feature (776)..(776): n is a, c, g, or t
  misc_feature (778)..(778): n is a, c, g, or t
  misc_feature (782)..(782): n is a, c, g, or t
  misc_feature (792)..(792): n is a, c, g, or t
  misc_feature (794)..(794): n is a, c, g, or t
  misc_feature (801)..(801): n is a, c, g, or t
  misc_feature (803)..(803): n is a, c, g, or t
  misc_feature (813)..(813): n is a, c, g, or t
  misc_feature (832)..(832): n is a, c, g, or t
  misc_feature (838)..(839): n is a, c, g, or t
natagagaaattactatgagaggatcgcatcaccatcaccatcacggatcctatttangtganactatagaatcgtcgacccacgcgtccgccgcgctcgcagctcgcaggcgccgcgtagccgtcgccaccgccgccagcccgtgcgccctcggcgcgtacccgccgcgctcccatccccgccgccggccaggggcgcgctcggccgccccggacagtgtcccgctgcggctccncggcgatggccaccaanatcgacaaagaggcttgccgggcggcgtacaacctggtgcgcgacgacggctcggccgtcatctgggtgacttttaaatatgacggctccaccatcgtccccggcgagcagggagcggagtaccagcacttcatccancantgnacagatgacgtccggttgtttgccttcgtgcgcttcaccaccggggatgccatgagcaagaggtccaagtttgccctcatcacgtggatcggtgagaacgtcagcgggctgcancgcgccaaaaccggganggacaagaccctggtgaaggaggtcgtacagaatttcgctaaggagtttgtgatcagtgatcggaaggagctggaggaagatttnatcaagagcganctgaagaaggcggggggagccaattacnacnccnananggagtaaccccanccnccngccacacnacnccttgccaaagtcatctgnctgctccccgggggagangaccgcngncctcngntantaacccaccaatncnaccatgaagaananaatncatgataggnancgcccgncnaccttgtgtncataatccccaaattcccncttccnnt

SEQ ID NO: 257 - DNA, 959 bp, Homo Sapiens
gaggatcgcatcaccatcaccatcacggatcctatttaggtgacactatagaatcgtcgacccacgcgtccgggccctttgtaccacatatcccatttgacttctatttgtgtgaaatggcctttccccgggtcaagccagcacctgatgaaacttccttcagtgaggccttgctgaagaggaatcaggacctggctcccaattctgctgaacaggcatctatcctttctctggtgacaaaaataaacaatgtgattgataatctgattgtggctccagggacatttgaagtgcaaattgaagaagttcgacaggtgggatcctataaaaaggggacaatgactacaggacacaatgtggctgacctggtggtgatactcaagattctgccaacgttggaagctgttgctgccctggggaacaaagtcgtggaaagcctaagagcacaggatccttctgaagttttaaccatgctgaccaacgaaactggctttgaaatcagttcttctgatgctacagtgaagattctcattacaacagtgccacccaatcttcgaaaactggatccagaactccatttggatatcaaagtattgcagagtgccttagcagccatccgacatgcccgctggttcgaggaaaatgcttctcagtccacagttaaagttctcatcagactactgaaggacttgaggattcgttttcctggctttgagcccctcacaccctggatccttgacctactaggccattatgctgtgatgaacaaccccaccagacagcctttggccctaaacgttgcatacaggcgctgcttgcagattctggctgcaggactgttcctgccaggttcagtgggtatcactgacccctgtgagagtggcaactttagagtacacacagtcatgaccctagaacagcaggacatggtctgctatacagctcagactctcgtccga

SEQ ID NO: 258 - DNA, 804 bp, Homo Sapiens
  misc_feature (1)..(3): n is a, c, g, or t
  misc_feature (675)..(675): n is a, c, g, or t
  misc_feature (750)..(750): n is a, c, g, or t
  misc_feature (776)..(776): n is a, c, g, or t
  misc_feature (798)..(798): n is a, c, g, or t
nnnctatgagaggatcgcatcaccatcaccatcacggatcctatttaggtgacactatagaatcgtcgacccacgcgtccgggaagatggctgccgcctgggggtcgtccctaacggccgcgacgcagagagcggtcactccctggccgaggggcaggctcctcacggcctccctgggaccccaggcgcgtcgggaggcgtcgtcctccagccccgaggccggcgaagggcagatccgcctcacagacagttgcgtccagaggcttttggaaatcaccgaagggtcagaattcctcaggctgcaagtggagggaggtggatgctccggattccaatacaaattttcactggatacagttatcaaccccgacgacagggtatttgaacagggtggggcaagagtggtggttgactctgatagcttggccttcgtgaaaggggcccaggtggacttcagccaagaactgatccgaagctcatttcaagtgttgaacaatcctcaagcacagcaaggctgctcctgtgggtcatctttctctatcaaactttgatgtgatgactggtgactctgggattgtcaccagttgtaccaatttgaagaacctggaattagtagaattctagaagtttacttctaatcatgtccctctcaattttatttcccgcagtccaggnagtgttatgttttgccactattattttcagaatgtgaagattttactcttggcttaatttttccctccactcagngctaaggctgagcctccagatgctgntacctcagatttaatcactggntgaaac

SEQ ID NO: 259 - DNA, 814 bp, Homo Sapiens
  misc_feature (3)..(3): n is a, c, g, or t
ttnagaggagaattaactatgagaggatcgcatcaccatcaccatcacggatcctatttaggtgacactatagaatcgtcgacccacgcgtccggcaacttgcatcttaaggaagagaaaatcaaaccagataccaatggtgctgttgtcaagaccaatgccaatgcagagaagacagatgaagaagagaaagaggacagagctgcccagtccttactcaacaagctgatcagaagcaaccttgttgataacacaaaccaagtggaagtcctgcagcgggatccaaactcccctctgtactcggtgaagtcttttgaagagcttcggctgaaaccacagcttctccaaggagtctatgccatgggtttcaatcgtccatccaagatacaagagaacgcattgccactgatgcttgctgagcccccacagaacttaattgcccaatctcagtctggtactggtaaaacagctgccttcgtgctggccatgcttagccaagtagaacctgcaaacaaatacccccagtgtctatgtctctccccaacgtatgagctcgccctccaaacaggaaaagtgattgaacaaatgggcaaattttaccctgaactgaagctagcttatgctgttcgaggcaataaattggaaagaggccagaagatcagtgagcagattgtcattggcacccctgggactgtgctggactggtgctccaagctcaagttcattgatcccaagaaaatcaaggtgtttgttctggatgaggctgatgtcatgatagccactcagggccaccaagatcagagcatccgcatcc

SEQ ID NO: 260 - DNA, 1179 bp, Homo Sapiens
  misc_feature (1)..(1): n is a, c, g, or t
  misc_feature (853)..(853): n is a, c, g, or t
  misc_feature (876)..(876): n is a, c, g, or t
  misc_feature (980)..(980): n is a, c, g, or t
  misc_feature (1016)..(1016): n is a, c, g, or t
  misc_feature (1035)..(1035): n is a, c, g, or t
  misc_feature (1045)..(1045): n is a, c, g, or t
  misc_feature (1059)..(1059): n is a, c, g, or t
  misc_feature (1065)..(1065): n is a, c, g, or t
  misc_feature (1080)..(1080): n is a, c, g, or t
  misc_feature (1085)..(1085): n is a, c, g, or t
  misc_feature (1089)..(1089): n is a, c, g, or t
  misc_feature (1092)..(1092): n is a, c, g, or t
  misc_feature (1102)..(1103): n is a, c, g, or t
  misc_feature (1110)..(1110): n is a, c, g, or t
  misc_feature (1121)..(1121): n is a, c, g, or t
  misc_feature (1135)..(1135): n is a, c, g, or t
  misc_feature (1138)..(1138): n is a, c, g, or t
  misc_feature (1142)..(1142): n is a, c, g, or t
  misc_feature (1159)..(1160): n is a, c, g, or t
  misc_feature (1162)..(1162): n is a, c, g, or t
  misc_feature (1174)..(1174): n is a, c, g, or t
naattagagaaattactatggagaggatcgcatcaccatcaccatcacggatcctatttaggtgacactatagaatcgtcgacccacgcgtccggccattttaaatccagctccatacaacgctccgccgccgctgctgccgcgacccggactgcgcgccagcacccccctgccgacagctccgtcactatggaggatatgaacgagtacagcaatatagaggaattcgcagagggatccaagatcaacgcgagcaagaatcagcaggatgacggtaaaatgtttattggaggcttgagctgggatacaagcaaaaaagatctgacagagtacttgtctcgatttggggaagttgtagactgcacaattaaaacagatccagtcactgggagatcaagaggatttggatttgtgcttttcaaagatgctgctagtgttgataaggttttggaactgaaagaacacaaactggatggcaaattgatagatcccaaaagggccaaagctttaaaagggaaagaacctcccaaaaaggtttttgtgggtggattgagcccggatacttctgaagaacaaattaaagaatattttggagcctttggagagattgaaaatattgaacttcccatggatacaaaaacaaatgaaagaagaggattttgttttatcacatatactgatgaagagccagtaaaaaaattgttagaaagcagataccatcaaattggttctgggaagtgtgaaatcaaagttgcacaacccaaagaggtatataggcagcaacagcaacaacaaaaaggtggaagaggtgctgcagctggtggacgaggtggtacgaggggtcgtggccgangtcagggccaaaactggaaccanggatttaataactattatgatcaaggatatgggaaattacaatagtgcctatggtggtgatcaaactatagtggctatggcggatatgattatactgggtatanctatgggaactatggatatggacaggggatatgcanactacagtggccaacaaancacttatggnaagggcatctcgangggggnggcaatccccaaacnatttncccnccntcctaaaggnnaaacttnggaaaaaaacnggggggaaatgttnaangtanccccctttgccagaacnnanttgaaaaatggncctct

SEQ ID NO: 261 - DNA, 1150 bp, Homo Sapiens
  misc_feature (1)..(1): n is a, c, g, or t
  misc_feature (846)..(846): n is a, c, g, or t
  misc_feature (884)..(884): n is a, c, g, or t
  misc_feature (928)..(928): n is a, c, g, or t
  misc_feature (930)..(930): n is a, c, g, or t
  misc_feature (953)..(953): n is a, c, g, or t
  misc_feature (958)..(958): n is a, c, g, or t
  misc_feature (963)..(964): n is a, c, g, or t
  misc_feature (975)..(975): n is a, c, g, or t
  misc_feature (981)..(981): n is a, c, g, or t
  misc_feature (987)..(987): n is a, c, g, or t
  misc_feature (1000)..(1000): n is a, c, g, or t
  misc_feature (1006)..(1006): n is a, c, g, or t
  misc_feature (1018)..(1018): n is a, c, g, or t
  misc_feature (1035)..(1035): n is a, c, g, or t
  misc_feature (1057)..(1057): n is a, c, g, or t
  misc_feature (1061)..(1061): n is a, c, g, or t
  misc_feature (1066)..(1066): n is a, c, g, or t
  misc_feature (1070)..(1070): n is a, c, g, or t
  misc_feature (1072)..(1072): n is a, c, g, or t
  misc_feature (1078)..(1078): n is a, c, g, or t
  misc_feature (1084)..(1084): n is a, c, g, or t
  misc_feature (1102)..(1103): n is a, c, g, or t
  misc_feature (1108)..(1108): n is a, c, g, or t
  misc_feature (1110)..(1110): n is a, c, g, or t
  misc_feature (1113)..(1113): n is a, c, g, or t
  misc_feature (1117)..(1117): n is a, c, g, or t
  misc_feature (1121)..(1121): n is a, c, g, or t
  misc_feature (1124)..(1124): n is a, c, g, or t
  misc_feature (1136)..(1137): n is a, c, g, or t
  misc_feature (1147)..(1147): n is a, c, g, or t
naatagagaaattactatgagaggatcgcatcaccatcaccatcacggatcctatttaggtgacactatagaatcgtcgacccacgcgtccgtggtgcgctgtcttcccgcttgcgtcagggacctgcccgactcagtggccgccatggcatcagatgaaggcaaactttttgttggagggctgagttttgacaccaatgagcagtcgctggagcaggtcttctcaaagtacggacagatctctgaagtggtggttgtgaaagacagggagacccagagatctcggggatttgggtttgtcacctttgagaacattgacgacgctaaggatgccatgatggccatgaatgggaagtctgtagatggacggcagatccgagtagaccaggcaggcaagtcgtcagacaaccgatcccgtgggtaccgtggtggctctgccgggggccggggcttcttccgtgggggccgaggacggggccgtgggttctctagaggaggaggggaccgaggctatggggggaaccggttcgagtccaggagtgggggctacggaggctccagagactactatagcagccggagtcagagtggtggctacagtgaccggagctcgggcgggtcctacagagacagttacgacagttacgctacacacaacgagtaaaaacccttcctgctcaagatcgtccttccaatggctgtgtgtttaaagattgtgggagcttcgctgaacgttaatgtgtagtaaatgcacctccttgtattcccactttcgtagtcatttcggttctgatcttgtcaaacccagcctgaccgcttctgacgccgggatggcctcgttactanacttttcttttttaaggaagtgctgttttttttttganggttttcaaaacattttgaaaagcatttactttttttgaccacnanccatgaatttttcaaaaaaatcnggggntgggnngggtttttggnttttgntttaanttttgggttgccnttgccntttttttttttnaggggggttggcccccntgaaagggggtgccccccctcncttnctctnaaantnaaacgnaattgnaaatccccccctttttcnnaaacntnaancaanctgnggntttttttccaanncccggggaanctt

SEQ ID NO: 262 - DNA, 989 bp, Homo Sapiens
  misc_feature (6)..(6): n is a, c, g, or t
  misc_feature (67)..(67): n is a, c, g, or t
  misc_feature (179)..(180): n is a, c, g, or t
  misc_feature (499)..(499): n is a, c, g, or t
  misc_feature (632)..(632): n is a, c, g, or t
  misc_feature (716)..(716): n is a, c, g, or t
  misc_feature (747)..(747): n is a, c, g, or t
  misc_feature (752)..(752): n is a, c, g, or t
  misc_feature (777)..(777): n is a, c, g, or t
  misc_feature (786)..(786): n is a, c, g, or t
  misc_feature (800)..(801): n is a, c, g, or t
  misc_feature (804)..(804): n is a, c, g, or t
  misc_feature (817)..(818): n is a, c, g, or t
  misc_feature (828)..(828): n is a, c, g, or t
  misc_feature (836)..(837): n is a, c, g, or t
  misc_feature (843)..(843): n is a, c, g, or t
  misc_feature (847)..(847): n is a, c, g, or t
  misc_feature (855)..(855): n is a, c, g, or t
  misc_feature (864)..(864): n is a, c, g, or t
  misc_feature (876)..(877): n is a, c, g, or t
  misc_feature (897)..(897): n is a, c, g, or t
  misc_feature (899)..(899): n is a, c, g, or t
  misc_feature (913)..(913): n is a, c, g, or t
  misc_feature (915)..(915): n is a, c, g, or t
  misc_feature (920)..(920): n is a, c, g, or t
  misc_feature (922)..(922): n is a, c, g, or t
  misc_feature (932)..(932): n is a, c, g, or t
  misc_feature (938)..(938): n is a, c, g, or t
  misc_feature (940)..(941): n is a, c, g, or t
  misc_feature (951)..(951): n is a, c, g, or t
  misc_feature (956)..(956): n is a, c, g, or t
  misc_feature (967)..(968): n is a, c, g, or t
  misc_feature (975)..(975): n is a, c, g, or t
  misc_feature (978)..(980): n is a, c, g, or t
  misc_feature (982)..(982): n is a, c, g, or t
  misc_feature (985)..(988): n is a, c, g, or t
agaganaatactatgagaggatcgcatcaccatcaccatcacggatcctatttaggtgacactatanaatcgtcgacccacgcgttccgtctcccgttgccacggagactgggcatctgctccctttgtgctgcccgagtgccttccccctggggtcaaggggtataggggggcagaannagaggcagacacacctctagagatgaacaggccgatccaggtcaagccagccgacagcgagagccgaggagaccggaagctctttgtggggatgctagggaagcagcagacagatgaggacgtccggaagatgtttgagcccttcgggaccatcgacgagtgcactgtgctccgggggccagatggcaccagcaaaggctgcgccttcgtgaagttccagacccacgctgaggcccaggcggccatcaacacccttcacagcagccggaccctgccaggtgcctcgtccagcctggtggtgaagtttgctgacactganaaggagcgaggtctccgccgcatgcagcaggtggccacccagttgggcatgttcagccccatcgccctccagtttggagcctacagcgcctacacccaggccctgatgcagcagcaggcggccctggtagcgnctcacagtgcctacctcagccccatggccaccatggctgccgtgcagatgcagcacatggttgccatcaatgccaatggtctcntcgccacccccatcaccccatcctcaggaanccagnaccccctcctgccatcgttgccacncctgttctntgcccatttccggnntgncccttggggcgtnnaacgggctanagccccgnntgcccncccnagccccantggggcaancctggccccctnnattgttctgtatccccaaangngggtttccaccccntnacccnangcccaaaaancccccngnngcccccccgngggancccccttgcanntaaggcnttnnncnggnnnnt

SEQ ID NO: 263 - DNA, 1326 bp, Homo Sapiens
  misc_feature (1)..(1): n is a, c, g, or t
  misc_feature (835)..(835): n is a, c, g, or t
  misc_feature (869)..(869): n is a, c, g, or t
  misc_feature (884)..(885): n is a, c, g, or t
  misc_feature (891)..(892): n is a, c, g, or t
  misc_feature (912)..(912): n is a, c, g, or t
  misc_feature (914)..(914): n is a, c, g, or t
  misc_feature (918)..(918): n is a, c, g, or t
  misc_feature (933)..(933): n is a, c, g, or t
  misc_feature (938)..(939): n is a, c, g, or t
  misc_feature (942)..(942): n is a, c, g, or t
  misc_feature (951)..(951): n is a, c, g, or t
  misc_feature (985)..(986): n is a, c, g, or t
  misc_feature (993)..(993): n is a, c, g, or t
  misc_feature (995)..(995): n is a, c, g, or t
  misc_feature (1001)..(1003): n is a, c, g, or t
  misc_feature (1119)..(1119): n is a, c, g, or t
  misc_feature (1126)..(1126): n is a, c, g, or t
  misc_feature (1128)..(1128): n is a, c, g, or t
  misc_feature (1177)..(1177): n is a, c, g, or t
ntaggcgattacttgagaggacgcatcaccatcaccatcacggtcgacccacgcgtccgcccacgcgtccggcgccaccgccacgagagcccgggacgcgggaaagaccgaaaggaagaggaagaggcaccggtggccatggggctggaggcggcgcgcgagctggagtgcgcggcgctgggcacgctgctgcgggatccgcgggaggcggaacgcacgctgctgctggactgccgccccttcctggccttctgccggcgccacgtgcgcgccgcgcggccagtgccttggaacgcgctgctgcggcgccgcgcgcgcggccctcctgccgccgttctcgcctgcctgctgcccgaccgcgcgctgcggacgcgcctggtccgcggggagctggcgcgggccgtggtgctggacgagggcagtgcctcggtggcggagctccggcccgacagcccggctcatgtgctgctggccgcgctgctgcacgagacccgcgcggggcccactgccgtgtacttcctgcgaggaggcttcgacggcttccagggctgctgtcccgatctgtgctctgaggcccccgcccctgcgctgccgccaacaggggacaaaaccagccgctccgactccagggctcctgtctacgaccagggtggccctggggagatcttgccctacctggtcctgggcagctgcagtcactcgtcagacctgctgggggtgcaggcctggggaatcccacccgccctcaacatgtccctcaactgcccctccgccttttaggcctttccagcatcttaaatttcttccggaaaaaaccccttactgtccacccggntatacaattcacccccctcttttctgcctccttnccactatttccccanntcccannctactccccaatcccctctncnaccncttaatcttccttgnccatnnccntacgtctcnccctgctcctcctctccctcacaaattatatctnnccctccnancctctnnnttacccatctctgcccaactacttaccccccccacactcttcccctgacgttcttccactttaccatctcacaggaccccaccacccacttgcgtcaacatccgcgacgccttccncccttcntncttcgtctcactccttctttctcatacctccatctgactttccacccanctacttacgcggtccctcttctactctaatgccccccctccatcttcctcctctcctcctcttacctaccctttcctcccaccctccctcctactcctcttactactctccactccacctctcatctcctcctctatcccctgtcccca

SEQ ID NO: 264 - DNA, 982 bp, Homo Sapiens
catcaccatcaccatcacggatcctatttaggtgacactatagaatcgtcgacccacgcgtccgagcagttcacagaaaaaatgcagtcagatatggagaaaatccaagaattaagagaggctcagttatactcagtggacgtgactctggacccagacacggcctaccccagcctgatcctctctgataatctgcggcaagtgcggtacagttacctccaacaggacctgcctgacaaccccgagaggttcaatctgtttccctgtgtcttgggctctccatgcttcatcgccgggagacattattgggaggtagaggtgggagataaagccaagtggaccataggtgtctgtgaagactcagtgtgcagaaaaggtggagtaacctcagccccccagaatggattctgggcagtgtctttgtggtatgggaaagaatattgggctcttacctccccaatgactgccctacccctgcggaccccgctccagcgggtggggattttcttggactatgatgctggtgaggtctccttctacaacgtgacagagaggtgtcacaccttcactttctctcatgctaccttttgtgggcctgtccggccctacttcagtctgagttactcgggagggaaaagtgcagctcctctgatcatctgccccatgagtgggatagatgggttttctggccatgttgggaatcatggtcattccatggagacctccccttgaggaggtgaattcaggccaaaagggctgttggctgtaatcctacgccaggcacaaggcatcttgttgccttgccacgtcctgtcacagctgggtatccttaccatgttccacgcccttgcagtgggagacaggatgtccatgttctctaccatccttttccttcccatgcagattgtgaaatgtaatgagatgtatcaagatatcctagaataaaaccagatgtccacctccagtgtttcatacttttctg

SEQ ID NO: 265 - DNA, 1161 bp, Homo Sapiens
  misc_feature (859)..(859): n is a, c, g, or t
  misc_feature (869)..(869): n is a, c, g, or t
  misc_feature (902)..(902): n is a, c, g, or t
  misc_feature (916)..(916): n is a, c, g, or t
  misc_feature (933)..(933): n is a, c, g, or t
  misc_feature (972)..(972): n is a, c, g, or t
  misc_feature (988)..(988): n is a, c, g, or t
  misc_feature (1002)..(1002): n is a, c, g, or t
  misc_feature (1008)..(1008): n is a, c, g, or t
  misc_feature (1018)..(1018): n is a, c, g, or t
  misc_feature (1044)..(1044): n is a, c, g, or t
  misc_feature (1046)..(1046): n is a, c, g, or t
  misc_feature (1065)..(1065): n is a, c, g, or t
  misc_feature (1067)..(1067): n is a, c, g, or t
  misc_feature (1069)..(1069): n is a, c, g, or t
  misc_feature (1077)..(1077): n is a, c, g, or t
  misc_feature (1081)..(1081): n is a, c, g, or t
  misc_feature (1104)..(1104): n is a, c, g, or t
  misc_feature (1112)..(1112): n is a, c, g, or t
  misc_feature (1116)..(1116): n is a, c, g, or t
  misc_feature (1120)..(1120): n is a, c, g, or t
  misc_feature (1124)..(1124): n is a, c, g, or t
  misc_feature (1126)..(1126): n is a, c, g, or t
  misc_feature (1135)..(1135): n is a, c, g, or t
  misc_feature (1145)..(1145): n is a, c, g, or t
  misc_feature (1154)..(1154): n is a, c, g, or t
  misc_feature (1161)..(1161): n is a, c, g, or t
atagagaaattactatgagaggatcgcatcaccatcaccatcacggatcctatttaggtgacactatagaatcgtcgacccacgcgtccgtagataatgccttaatacgtcctggtcgttttgacatgcaagttacagttccaaggccagatgtaaaaggtcgaacagaaattttgaaatggtatctcaataaaataaagtttgatcaatccgttgatccagaaattatagctcgaggtactgttggcttttccggagcagagttggagaatcttgtgaaccaggctgcattaaaagcagctgttgatggaaaagaaatggttaccatgaaggagctggagttttccaaagacaaaattctaatggggcctgaaagaagaagtgtggaaattgataacaaaaacaaaaccatcacagcatatcatgaatctggtcatgccattattgcatattacacaaaagatgcaatgcctatcaacaaagctacaatcatgccacgggggccaacacttggacatgtgtccctgttacctgagaatgacagatggaatgaaactagagcccagctgcttgcacaaatggatgttagtatgggaggaagagtggcagaggagcttatatttggaaccgaccatattacaacaggtgcttccagtgattttgataatgccactaaaatagcaaagcggatggttaccaaatttggaatgagtgaaaagcttggagttatgacctacagtgatacagggaaactaagtccagaaacccaatctgccatcgaacaagaaataagaatccttctaagggactcatatgaacgagcaaaacatatcttgaaactcatgcaaaggagcataanaatctcgcanaagctttattgacctatgaaactttggatgccnaagagattccaatngttcttgaggggaaaangtgggaagtgagatgataactctcttgatatggatgctngctggttttatgcaanaataaagtagcatngcatantctactttanacgctttcccccattctgatgggggnantgaaggggggaaagcttgncnanccttgccnattntcccgttggggtttcccctaganccctttgnaatnaccncccngnaaatttttngaaaaataanacttccggntgaaccn

SEQ ID NO: 266 - DNA, 909 bp, Homo Sapiens
  misc_feature (2)..(2): n is a, c, g, or t
  misc_feature (752)..(752): n is a, c, g, or t
  misc_feature (771)..(771): n is a, c, g, or t
  misc_feature (815)..(815): n is a, c, g, or t
  misc_feature (823)..(823): n is a, c, g, or t
  misc_feature (831)..(831): n is a, c, g, or t
  misc_feature (836)..(836): n is a, c, g, or t
  misc_feature (850)..(850): n is a, c, g, or t
  misc_feature (853)..(853): n is a, c, g, or t
  misc_feature (860)..(860): n is a, c, g, or t
  misc_feature (873)..(873): n is a, c, g, or t
  misc_feature (878)..(879): n is a, c, g, or t
  misc_feature (889)..(892): n is a, c, g, or t
  misc_feature (895)..(895): n is a, c, g, or t
  misc_feature (898)..(899): n is a, c, g, or t
  misc_feature (908)..(909): n is a, c, g, or t
tnagagaaattactatgagaggatcgcatcaccatcaccatcacggatcctatttaggtgacactatagaatcgtcgacccacgcgtccggtggaggaaagatggaggaccatcagcacgtgcccatcgacatccagaccagcaagctgctcgattggctggtggacagaaggcactgcagcctgaaatggcagagtctggtgctgacgatccgcgagaagatcaatgctgccatccaggacatgccagagagcgaagagatcgcccagctgctgtctgggtcctacattcactactttcactgcctaagaatcctggaccttctcaaaggcacagaggcctccacgaagaatatttttggccgatactcttcacagcggatgaaggattggcaggagattatagctctgtatgagaaggacaacacctacttagtggaactctctagcctcctggttcggaatgtcaactatgagatcccctcactgaagaagcagattgccaagtgccagcagctgcagcaagaatacagccgcaaggaggaggagtgccaggcaggggctgccgagatgcgggagcagttctaccactcctgcaagcagtatggcatcacgggcgaaaatgtccgaggagaactgctggccctggtgaaggacctgccgagtcagctggctgagattggggcagcggctcagcagtccctgggggaagccattgacgtgtaccaggcgtctgtggggtttgtgtgtganagccccacagagcaggtgnttgccaatgctgcggttcgtgcaaaagcggggaaactcaacggngtacgagngggagganagggnacagaaccctctgnggnggaaacnacccccccctccnagganntttcctggannnnggnggnnaaaaaaatnn

SEQ ID NO: 267 - DNA, 854 bp, Homo Sapiens
  misc_feature (750)..(750): n is a, c, g, or t
  misc_feature (794)..(794): n is a, c, g, or t
  misc_feature (806)..(806): n is a, c, g, or t
  misc_feature (812)..(812): n is a, c, g, or t
  misc_feature (818)..(818): n is a, c, g, or t
  misc_feature (834)..(834): n is a, c, g, or t
  misc_feature (845)..(845): n is a, c, g, or t
  misc_feature (847)..(847): n is a, c, g, or t
  misc_feature (851)..(851): n is a, c, g, or t
tcttaagaggagaattaactatgagaggatcgcatcaccatcaccatcacggatcctatttaggtgacactatagaatcgtcgacccacgcgtccggaagctctcagtctgggagcaggcacagttctccccgagccttgatacatggcagtatcggtgatattctgccaaaaactgaagaccggcagtgtaaagctttggattcagatgctgttgtggttgcagttttcagtggcttgcctgcggttgagaaaaggaggaaaatggtcaccttgggggctaatgctaaaggaggtcatctggaaggactgcagatgactgatttggaaaataattctgaaactggagagttacagcctgtactacctgaaggagcttcagctgcccctgaagaaggaatgagtagcgacagtgacattgaatgtgacactgagaatgaggagcaggaagagcataccagtgtgggcgggtttcacgactccttcatggtcatgacacagcccccggatgaagatacacattccagttttcctgatggtgaacaaataggccctgaagatctcagcttcaatacagatgaaaatagtggaaggtaattgccaaatcaagagaactgacttgcaagctaccttgaccctgaattttggctgtagttggtgctcaaatttgtcatcagtcagataatcagatttggtcttatttcttcattatctcgacctgaaatagtaatttggaaactgttggaaaggnggcacagtttagtctaagacagcagtagtacatgggaaaaaagntatgggaaaaantttttntaatgnaaggaaataacaatgnagttctctatnanttancaa

SEQ ID NO: 268 - DNA, 977 bp, Homo Sapiens
  misc_feature (11)..(11): n is a, c, g, or t
  misc_feature (124)..(124): n is a, c, g, or t
  misc_feature (204)..(204): n is a, c, g, or t
  misc_feature (236)..(236): n is a, c, g, or t
  misc_feature (283)..(283): n is a, c, g, or t
  misc_feature (293)..(293): n is a, c, g, or t
  misc_feature (310)..(310): n is a, c, g, or t
  misc_feature (621)..(621): n is a, c, g, or t
  misc_feature (780)..(780): n is a, c, g, or t
  misc_feature (806)..(806): n is a, c, g, or t
  misc_feature (825)..(825): n is a, c, g, or t
  misc_feature (830)..(830): n is a, c, g, or t
  misc_feature (833)..(833): n is a, c, g, or t
  misc_feature (844)..(844): n is a, c, g, or t
  misc_feature (848)..(848): n is a, c, g, or t
  misc_feature (858)..(858): n is a, c, g, or t
  misc_feature (894)..(895): n is a, c, g, or t
  misc_feature (904)..(905): n is a, c, g, or t
  misc_feature (911)..(911): n is a, c, g, or t
  misc_feature (917)..(918): n is a, c, g, or t
  misc_feature (921)..(922): n is a, c, g, or t
  misc_feature (924)..(924): n is a, c, g, or t
  misc_feature (945)..(945): n is a, c, g, or t
  misc_feature (948)..(948): n is a, c, g, or t
  misc_feature (951)..(951): n is a, c, g, or t
  misc_feature (957)..(957): n is a, c, g, or t
  misc_feature (963)..(963): n is a, c, g, or t
  misc_feature (969)..(969): n is a, c, g, or t
  misc_feature (977)..(977): n is a, c, g, or t
agagaaattanctatgagaggatcgcatcaccatcaccatcacggatcctatttaggtgacactatagaatcgtcgacccacgcgtccgtggcattacagcagattgcagattttatgaccacnaatgtaccaaatgtctacccagcagctccgcaaggagggatggctgccttaaacatgagtcttggtatggtgactcctgngaacgatcttagaggatctgattctattgcgnatgacaaaggagagaagttattacggtgtaaattggcagcgttttanagactagcanatctctttgggtggtcncagcttatctacaatcatatcacaaccagagtgaactccgagcaggaacacttcctcattgtcccttttgggcttctttacagtgaagtgactgcatccagtttggttaagatcaatctacaaggagatatagtagatcgtggaagcactaatctgggagtgaatcaggccggcttcaccttacactctgcaatttatgctgcacgcccggacgtgaagtgcgtcgtgcacattcacaccccagcaggggctgcggtctctgcaatgaaatgtggcctcttgccaatctccccggaggcgctttcccttgnagaagtggcttatcatgactaccatggcattctggttgatgaacaggaaaaagttttgattcagaaaaatctggggcctaaaagcaaggttcttattctccggaaccatgggctcgtgtcagttggacagagcgttgaggaggccttctattacatccntaaccttgtggttgcctgtgacatcnaggttcgaactctggccantgcangangaccagacaanttantcctgctgantcctgagaagtacaaagccaagtcccgttcccccanngtctccagnnaagggnaaggcnntgnntngcctcccaatggcaaattggngancanaatttnaaaccnccatgnggatgctn

SEQ ID NO: 269 - DNA, 836 bp, Homo Sapiens
tgagaggtcgcatcaccatcaccatcacggatcctatttaggtgacactatagaatcgtcgacccacgcgtccggccgatggagccaccgatggagccgtccggaggggagcaagagcccggagccgtcaggttcctggacctgccctgggaagacgtgctgctcccacacgtcctgaaccgggtcccgctgcgccagctgctccggctgcagcgcgttagccgggccttccggtcgctggtgcagcttcacctggccgggctgcgtcgcttcgatgccgcgcaggtgggtccgcagatcccgcgggccgcattggcccggctgctgcgggatgccgaggggctgcaggagctggcactggcgccgtgtcacgaatggctgtcagacgaggacctggtgccggtgctggcgcggaatccgcagctgcggagtgtggcgttgggcggctgcgggcaactgagtcgccgggcgcttggggctttggccgagggctgcccacgcctgcagcgcctgtcgctcgcgcactgtgactgggtggacgggctggcgctgcgcggcctcgctgatcgctgcccggccctggaggagctggatctcaccgcctgccgccagctcaaggacgaggccatcgtgtacctggcgcagaggcgcggcgctggtctccgcagcctctctctggccgtcaacgccaacgtgggggacgccgcggttcaagagttggctcggaactgcccagaactccaccaccttgacctcaccggctgcctccgcgtcggaagcgacggtgtcaggacattggccgagtactgccccgtgctgcgttcgctgcgggtgcg

SEQ ID NO: 270 - DNA, 1242 bp, Homo Sapiens
  misc_feature (853)..(853): n is a, c, g, or t
  misc_feature (889)..(889): n is a, c, g, or t
  misc_feature (955)..(955): n is a, c, g, or t
  misc_feature (974)..(975): n is a, c, g, or t
  misc_feature (984)..(984): n is a, c, g, or t
  misc_feature (995)..(995): n is a, c, g, or t
  misc_feature (1002)..(1002): n is a, c, g, or t
  misc_feature (1008)..(1008): n is a, c, g, or t
  misc_feature (1017)..(1017): n is a, c, g, or t
  misc_feature (1020)..(1021): n is a, c, g, or t
  misc_feature (1038)..(1039): n is a, c, g, or t
  misc_feature (1043)..(1043): n is a, c, g, or t
  misc_feature (1050)..(1050): n is a, c, g, or t
  misc_feature (1061)..(1061): n is a, c, g, or t
  misc_feature (1068)..(1068): n is a, c, g, or t
  misc_feature (1071)..(1071): n is a, c, g, or t
  misc_feature (1075)..(1075): n is a, c, g, or t
  misc_feature (1079)..(1079): n is a, c, g, or t
  misc_feature (1082)..(1082): n is a, c, g, or t
  misc_feature (1092)..(1092): n is a, c, g, or t
  misc_feature (1095)..(1095): n is a, c, g, or t
  misc_feature (1099)..(1099): n is a, c, g, or t
  misc_feature (1115)..(1115): n is a, c, g, or t
  misc_feature (1117)..(1117): n is a, c, g, or t
  misc_feature (1124)..(1124): n is a, c, g, or t
  misc_feature (1153)..(1154): n is a, c, g, or t
  misc_feature (1157)..(1158): n is a, c, g, or t
  misc_feature (1161)..(1161): n is a, c, g, or t
  misc_feature (1164)..(1164): n is a, c, g, or t
  misc_feature (1186)..(1186): n is a, c, g, or t
  misc_feature (1191)..(1191): n is a, c, g, or t
  misc_feature (1195)..(1195): n is a, c, g, or t
  misc_feature (1209)..(1209): n is a, c, g, or t
  misc_feature (1211)..(1211): n is a, c, g, or t
  misc_feature (1215)..(1215): n is a, c, g, or t
  misc_feature (1219)..(1219): n is a, c, g, or t
  misc_feature (1223)..(1223): n is a, c, g, or t
  misc_feature (1230)..(1230): n is a, c, g, or t
  misc_feature (1236)..(1236): n is a, c, g, or t
tagagagaattactatgagaggatcgcatcaccatcaccatcacggatcctatttaggtgacactatagaatcgtcgacccacgcgtccgagcgcaggttgtccccgtttcccctcccccttcccttctccggttgccttcccgggccccttacactccacagtcccggtcccgccatgtcccagaaacaagaagaagagaaccctgcggaggagaccggcgaggagaagcaggacacgcaggagaaagaaggtattctgcctgagagagctgaagaggcaaagctaaaggccaaatacccaagcctaggacaaaagcctggaggctccgacttcctcatgaagagactccagaaagggcaaaagtactttgactcaggagactacaacatggccaaagccaagatgaagaataagcagctgccaagtgcaggaccagacaagaacctggtgactggtgatcacatccccaccccacaggatctgccccagagaaagtcctcgctcgtcaccagcaagcttgcgggtggccaagttgaatgatgctgcccggggctctgccagatcctgagacgcttcccctccctgccccacccgggtcctgtgctggctcctgccccttcctgcttttgcagccaggggtcaggaggtggctcgggtgtgggctggagaggcagaagccctttcctgttggtgtcccagcacatggagccccttgggctgagcaccaagaccttgaaccttttttgttttaccttttttccaaataacagttgggagaaatatcaatgaaattctgggggtgggggtggggttgaaagggtggggtgggagatatggaggagtatgaattnagggcttggagttggtaaaaaacattcctgactatnccttcttaaccacgtggctgatgtgggggtaggtatgaggggaaaggaagtggagtaacctaatgnaaaaaggggttctagttgnncttctgtanataaatgcctngtttcantggggnttggaaacntgnngtcaaaaaaaaaaaacnncctncgcccanaaagatgcaanagttccnttntttntgcnaanctagttgganaanccanattaatctttttaaangnacttgtncttgaaaaaattttttggggaaaaaaggnntgnntgnggnaaaaaaaccctgaggggggganccccnaaancccaagaatttttntntttnaaanaaanaaaaaanccctgnaaaaaa

SEQ ID NO: 271 - DNA, 835 bp, Homo Sapiens
  misc_feature (3)..(3): n is a, c, g, or t
  misc_feature (693)..(694): n is a, c, g, or t
  misc_feature (710)..(710): n is a, c, g, or t
  misc_feature (725)..(725): n is a, c, g, or t
  misc_feature (729)..(729): n is a, c, g, or t
  misc_feature (740)..(740): n is a, c, g, or t
  misc_feature (744)..(744): n is a, c, g, or t
  misc_feature (749)..(749): n is a, c, g, or t
  misc_feature (756)..(756): n is a, c, g, or t
  misc_feature (789)..(789): n is a, c, g, or t
  misc_feature (798)..(798): n is a, c, g, or t
  misc_feature (810)..(811): n is a, c, g, or t
  misc_feature (821)..(821): n is a, c, g, or t
  misc_feature (829)..(829): n is a, c, g, or t
ctntgagaggatcgcatcaccatcaccatcacggatcctatttaggtgacactatagaatcgtcgacccacgcgtccgatccgaaggacaatctgcccttgcaggaaaatgtaacaatccagaaacaaaaacggagatccgtcaactccaaaattcctgctccaaaagaaagtcttcgaagccgctccactcgcatgtccactgtctcagagcttcgcatcacggctcaggagaatgacatggaggtggagctgcctgcagctgcaaactcccgcaagcagttttcagttcctcttcggaggaaatcatgtcttgtgaaggaagtggaaaaaatgaagaacaagcgagaagagaagaaggcccagaactctgaaatgagaatgaagagagctcaggagtatgacagtagttttccaaactgggaatttgcccgaatgattaaagaatttcgggctactttggaatgtcatccacttactatgactgatcctatcgaagagcacagaatatgtgtctgtgttaggaaacgcccactgaataagcaagaattggccaagaaagaaattgatgtgatttccattcctagcaagtgtctcctcttggtacatgaacccaagttgaaaagtggacttaacaaagtatctggagaaccaagcattctgctttgactttgcatttgatgaaacagcttcnnaatgaagttgtctacnggttcacagcaaggncccntggtacagacnattntttgnagggggnaaaagcaacttgtttttgcatatggcccagacnggaaggggnaagaaacatacnntggggggggngacctccnctggga

SEQ ID NO: 272 - DNA, 1072 bp, Homo Sapiens
  misc_feature (15)..(15): n is a, c, g, or t
  misc_feature (100)..(100): n is a, c, g, or t
  misc_feature (903)..(903): n is a, c, g, or t
  misc_feature (924)..(924): n is a, c, g, or t
  misc_feature (938)..(938): n is a, c, g, or t
  misc_feature (943)..(944): n is a, c, g, or t
  misc_feature (959)..(959): n is a, c, g, or t
  misc_feature (964)..(964): n is a, c, g, or t
  misc_feature (966)..(966): n is a, c, g, or t
  misc_feature (969)..(969): n is a, c, g, or t
  misc_feature (973)..(973): n is a, c, g, or t
  misc_feature (989)..(989): n is a, c, g, or t
  misc_feature (1012)..(1012): n is a, c, g, or t
  misc_feature (1019)..(1019): n is a, c, g, or t
  misc_feature (1023)..(1023): n is a, c, g, or t
  misc_feature (1044)..(1044): n is a, c, g, or t
  misc_feature (1049)..(1049): n is a, c, g, or t
  misc_feature (1051)..(1051): n is a, c, g, or t
  misc_feature (1057)..(1057): n is a, c, g, or t
  misc_feature (1059)..(1059): n is a, c, g, or t
  misc_feature (1061)..(1061): n is a, c, g, or t
  misc_feature (1064)..(1064): n is a, c, g, or t
  misc_feature (1066)..(1066): n is a, c, g, or t
  misc_feature (1070)..(1070): n is a, c, g, or t
ttgaggaaattactntgagaggatgcataccatcaccatcacggatcctatttaggtgacactatagaatcgtcgacccacgcgtccggacggacccagntctcggcctgggtggacctcccaacccaccagggccaagcccaaaagccctggccaagatgatgggcggcgcaggtcctggcagctcactggaagcccgcagcccctcggaccttcacatctcacccttggccaagaagttgccaccaccaccgggcagccccctgggccactcaccaactgcctctcctcctcctacggcccgaaagatgttcccaggcctggctgcaccctccttgcccaagaagctgaagcctgaacaaatacgggtggagatcaagcgggagatgctgccgggggcccttcatggggaactgcacccatctgagggtccctggggggcaccacgggaagacatgacacccctgaacctgtcgtcccgggcagagccggtgcgcgacatccgctgtgagttctgcggcgagttcttcgagaaccgcaagggcctgtcgagtcacgcgcgctcacacctgcggcagatgggtgtgaccgagtggtccgtcaatggttcgcccatcgacacactgcgagagatcctcaagaagaagtccaagccgtgcctcatcaagaaggagccaccggctggagacctggcccctgccctggctgaggacgggcctcccaccgtggcccctgggcccgtgcagtccccactgccgctgtcgcccctggctggccggccaggcaaaccaggtgcagggccggcccaggttcctcgtgagctcagcctgacgcccatcactggggccaagccctcagccactggctacctgggctcagtggcagccaagcggcccctgcagnaggaccgcctcctcccagcanaggtcaaggccaanactanntccaactgaatgccnttcangnaanaccnttcatgaaaaactccnctcctccccgagcctgctgcaantgtgtgncttnatttgaaaccgaaggcctggncagcncnccgggnancntgngnattngg

SEQ ID NO: 273 - DNA, 713 bp, Homo Sapiens
cgattagagagaattactatgagaggatcgcatcaccatcaccatcacggatcctatttaggtgacactatagaatcgtcgacccacgcgtccgcggacgcgtgggggcaaaaagcaaaagaagtgcagaagaagctggtgcataatgctctggcaaatttggatggtcatccagaggataagccaacgcacatcatcttcggttctgacagtgaatgtgaaacagaggagacatcgactcaggagcagagccatccaggagaggaatgggtgaaagagtctatgggtaaaacatcagggaagctgtttgatagcagtgatgatgacgaatctgattctgaagatgacagtaataggttcaaaattaaacctcagtttgagggcagagctggacagaagctcatggatttacagtcgcactttggcaccgatgacagattccgcatggactctcgatttctagaaactgacagtgaagaggaacaggaagaggtaaatgaaaagaaaactgctgaggaagaagagcttgctgaagaaaaaaagaaagccctgaatgttgtacaaagtgttttgcaaatcaacttaagcaattctacaaacagaggatcagtagctgctaagaaatttaaggacatcatacattatgatccaacgaagcaagaccatgccacttacgaaagaaaaagagatgataagccaaaagaaagtaaagc

SEQ ID NO: 274 - DNA, 764 bp, Homo Sapiens
catcaccatcaccatcacggatcctatttaggtgacactatagaatcgtcgacccacgcgtccgcttataaaagggacaatacttttttcagagaatcacctgttggccgaaaggattctccacacagcagatctggttccagtgtcagtagcagaagctactctccagaaaggagcaaatcatactctttccatcagtctcaacatagaaataaagagaggcctgtccagtctttgaaaacatcaagagatacttcaccctcaagtggttcagcagtttcttcatcaaaggtgttagacaaacccagtaggctaactgaaaaggaacttgctgaggctgcaagcaagtgggctgctgaaaagctagagaaatcagatgaaagtaacttgcctgaaatttctgagtatgaggcgggatccacagcaccattgtttactgaccagccagaggaacctgagtcaaacacaacacatgggatagaattatttgaagatagtcagctaaccactcgctctaaagcaatagcatcaaaaaccaaagagattgaacaggtttaccgacaagactgtgaaactttcgggatggtggtgaaaatgctgattgaaaaagatccttcattagaaaagtctatacagtttgcattgaggcagaatttacatgaaataggtgagcggtgtgttgaagaactcaagcatttcattgcagagtatgatacttccactcaagattttggagagcctttttagatttttctgctcaggct

SEQ ID NO: 275 - DNA, 1125 bp, Homo Sapiens
  misc_feature (1)..(1): n is a, c, g, or t
  misc_feature (3)..(3): n is a, c, g, or t
  misc_feature (203)..(203): n is a, c, g, or t
  misc_feature (767)..(767): n is a, c, g, or t
  misc_feature (791)..(791): n is a, c, g, or t
  misc_feature (798)..(798): n is a, c, g, or t
  misc_feature (809)..(809): n is a, c, g, or t
  misc_feature (812)..(812): n is a, c, g, or t
  misc_feature (815)..(815): n is a, c, g, or t
  misc_feature (831)..(831): n is a, c, g, or t
  misc_feature (836)..(836): n is a, c, g, or t
  misc_feature (858)..(858): n is a, c, g, or t
  misc_feature (880)..(880): n is a, c, g, or t
  misc_feature (902)..(902): n is a, c, g, or t
  misc_feature (912)..(912): n is a, c, g, or t
  misc_feature (916)..(916): n is a, c, g, or t
  misc_feature (929)..(929): n is a, c, g, or t
  misc_feature (935)..(935): n is a, c, g, or t
  misc_feature (938)..(938): n is a, c, g, or t
  misc_feature (942)..(942): n is a, c, g, or t
  misc_feature (970)..(970): n is a, c, g, or t
  misc_feature (978)..(978): n is a, c, g, or t
  misc_feature (986)..(986): n is a, c, g, or t
  misc_feature (1001)..(1002): n is a, c, g, or t
  misc_feature (1006)..(1006): n is a, c, g, or t
  misc_feature (1012)..(1012): n is a, c, g, or t
  misc_feature (1025)..(1025): n is a, c, g, or t
  misc_feature (1034)..(1035): n is a, c, g, or t
  misc_feature (1043)..(1043): n is a, c, g, or t
  misc_feature (1045)..(1045): n is a, c, g, or t
  misc_feature (1053)..(1054): n is a, c, g, or t
  misc_feature (1058)..(1058): n is a, c, g, or t
  misc_feature (1065)..(1065): n is a, c, g, or t
  misc_feature (1075)..(1077): n is a, c, g, or t
  misc_feature (1079)..(1080): n is a, c, g, or t
  misc_feature (1095)..(1095): n is a, c, g, or t
  misc_feature (1099)..(1099): n is a, c, g, or t
  misc_feature (1101)..(1101): n is a, c, g, or t
  misc_feature (1112)..(1112): n is a, c, g, or t
  misc_feature (1117)..(1117): n is a, c, g, or t
nantagagaaattactatgagaggatcgcatcaccatcaccatcacggatcctatttaggtgacactatagaatcgtcgacccacgcgtccgacagagcagagcaagtcggagctgagctcacggctggacacgctgagtgcggagaaggatgctctgagtggagctgtgcggcagcgggaggcagacctgctggcggcgcanagcctggtgcgcgagacagaggcggcgctgagccgggagcagcagcgcagctcccaggagcagggcgagttgcagggccggctggcagagagggagtctcaggagcaggggctgcggcagaggctgctggacgagcagttcgcagtgttgcggggcgctgctgccgaggccgcgggcatcctgcaggatgccgtgagcaagctggacgaccccctgcacctgcgctgtaccagctccccagactacctggtgagcagggcccaggaggccttggatgccgtgagcaccctggaggagggccacgcccagtacctgacctccttggcagacgcctccgccctggtggcagctctgacccgcttctcccacctggctgcggataccatcatcaatggcggtgccacctcgcacctggctcccaccgaccctgccgaccgcctcatagacacctgcagggagtgcggggcccgggctctggagctcatggggcagctgcaggaccagcaggctctgcggcacatgcaggccagcctggtgcggacacccctgcagggcatccttcanctgggccaggaactgaaacccaanagcctanatgtgcggcanganganctgggggccgtggtcnacaangaaatggcggccacatccgcanccattgaaaatgctgtgcggangattgaggacatgatgaaccangcacgccacnccanctcgggggtgaanctggangtnaacnaaaagaatcctcaactcctgcacaaacntgatgaangctatccngctcctggtgacaanntccnctaacntgcaaaagaaatnttgaaaacnncagggggncncccccccnncagnaattttnccccaaaaannncnnttgaaccaaagcctntttngncctccaaggtntgggnttgggaac

SEQ ID NO: 276 - DNA, 1311 bp, Homo Sapiens
  misc_feature (1)..(2): n is a, c, g, or t
nnccgcccccccccttagagaatacttgagaggatgcatcaccatcaccatcacggtcgacccacgcgtccgggcgccgccatgtccgacagcgagaagctcaacctggactcgatcatcgggcgcctgctggaagtgcagggctcgcggcctggcaagaatgtacagctgacagagaacgagatccgcggtctgtgcctgaaatcccgggagatttttctgagccagcccattcttctggagctggaggcacccctcaagatctgcggtgacatacacggccagtactacgaccttctgcgactatttgagtatggcggtttccctcccgagagcaactacctctttctgggggactatgtggacaggggcaagcagtccttggagaccatctgcctgctgctggcctataagatcaagtaccccgagaacttcttcctgctccgtgggaaccacgagtgtgccagcatcaaccgcatctatggtttctacgatgagtgcaagagacgctacaacatcaaactgtggaaaaccttcactgactgcttcaactgcctgcccatcgcggccatagtggacgaaaagatcttctgctgccacggaggcctgtccccggacctgcagtctatggagcagattcggcggatcatgcggcccacagatgtgcctgaccagggcctgctgtgtgacctgctgtggtctgaccctgacaaggacgtgcagggctggggcgagaacgaccgtggcgtctcttttacctttggagccgaggtggtggccaagttcctccacaagcacgacttggacctcatctgccgagcacaccaggtgggtagaagacggctacgagttctttgccaagcggcagctggtgacacttatctcaactccccactacctgtggcgaagttgaccatgcttgccccatgaagaactgtggaccaaaacccccaggggtctcttccaaatcctccagccccaccacaagaacaacgcgaaataccgcccactccatgcccctcaaccttgaagcctaccctctcccctccccccaaattcaccccactccacaataaacccccatccaccacccgggctccacaaaatcgatctcctgccaccaacaacccaacacctccacgaactctttccacccatcccataactctacacaccccaacacacgtcccctaaccactaccacccctttatccacctaatacccccccccttacaacttacactccacaccacagaccacttctcccatcacctccaacccatacactactccatccacaagccacctcc

SEQ ID NO: 277 - DNA, 1034 bp, Homo Sapiens
  misc_feature (806)..(806): n is a, c, g, or t
  misc_feature (826)..(826): n is a, c, g, or t
  misc_feature (842)..(842): n is a, c, g, or t
  misc_feature (867)..(867): n is a, c, g, or t
  misc_feature (869)..(869): n is a, c, g, or t
  misc_feature (872)..(872): n is a, c, g, or t
  misc_feature (875)..(875): n is a, c, g, or t
  misc_feature (890)..(890): n is a, c, g, or t
  misc_feature (924)..(924): n is a, c, g, or t
  misc_feature (935)..(935): n is a, c, g, or t
  misc_feature (943)..(943): n is a, c, g, or t
  misc_feature (960)..(960): n is a, c, g, or t
  misc_feature (963)..(963): n is a, c, g, or t
  misc_feature (965)..(965): n is a, c, g, or t
  misc_feature (969)..(969): n is a, c, g, or t
  misc_feature (971)..(971): n is a, c, g, or t
  misc_feature (980)..(980): n is a, c, g, or t
  misc_feature (990)..(990): n is a, c, g, or t
  misc_feature (997)..(997): n is a, c, g, or t
  misc_feature (1009)..(1009): n is a, c, g, or t
  misc_feature (1017)..(1017): n is a, c, g, or t
  misc_feature (1019)..(1019): n is a, c, g, or t
  misc_feature (1026)..(1027): n is a, c, g, or t
  misc_feature (1029)..(1030): n is a, c, g, or t
  misc_feature (1034)..(1034): n is a, c, g, or t
aatagagaaaattactatgagaggatcgcatcaccatcaccatcacggatcctatttaggtgacactatagaatcgtcgacccacgcgtccgcccacgcgtccggaaacccacgccacccgcgtcatcgcccttatcaacgaccagcgccgggctgccttggagggcttcctggcagccctgcaggcagatccgcctcaggcggagcgtgtcctgttggccctgcggcgctacctgcgtgcggagcagaaggaacagaggcacacgctgcgccactaccagcatgtggccgccgtggatcccgagaaggcacagcagatgcgcttccaggtgcatacccaccttcaagtgattgaggagagggtgaatcagagcctgggcctgcttgaccagaacccccacctggctcaggagctgcggccccaaatccaggaactcctccactctgaacacctgggtcccagtgaattggaagcccctgcccctgggggcagcagcgaggacaagggtgggctgcagcctccagattccaaggatgcagacacccccatgacccttccaaaagggtccacagaacaagatgctgcatcccctgagaaagagaagatgaacccgctggaacagtatgagcgaaaggtgaatgcgtctgttccaaggggtttccctttccactcatcggagattcagagggatgagctggcaccagctgggacaggggtgtcccgtgaggctgtgtcgggtctgctgatcatgggagcgggcggaggctccctcatcgtcctctccatgctgctcctgcgcaggaanaagccctacggggctatcanccatggcgtggtggangtggaccccatgctgaccctggagnancancanctccgcgaactgcancggcacggctatgaaaaccccacttaccgcttcntggaagaaacnaccctganccggcccccttcacccnttnanccgnancccaaaacntccccttttnctggaanccccaaaacccnaattcccnancttaggnnannaggn

SEQ ID NO: 278 - DNA, 1176 bp, Homo Sapiens
  misc_feature (830)..(830): n is a, c, g, or t
  misc_feature (895)..(895): n is a, c, g, or t
  misc_feature (911)..(911): n is a, c, g, or t
  misc_feature (919)..(919): n is a, c, g, or t
  misc_feature (962)..(962): n is a, c, g, or t
  misc_feature (965)..(965): n is a, c, g, or t
  misc_feature (992)..(992): n is a, c, g, or t
  misc_feature (995)..(995): n is a, c, g, or t
  misc_feature (1001)..(1001): n is a, c, g, or t
  misc_feature (1006)..(1006): n is a, c, g, or t
  misc_feature (1015)..(1015): n is a, c, g, or t
  misc_feature (1032)..(1032): n is a, c, g, or t
  misc_feature (1040)..(1040): n is a, c, g, or t
  misc_feature (1042)..(1042): n is a, c, g, or t
  misc_feature (1048)..(1048): n is a, c, g, or t
  misc_feature (1059)..(1059): n is a, c, g, or t
  misc_feature (1068)..(1068): n is a, c, g, or t
  misc_feature (1073)..(1073): n is a, c, g, or t
  misc_feature (1085)..(1085): n is a, c, g, or t
  misc_feature (1095)..(1095): n is a, c, g, or t
  misc_feature (1105)..(1105): n is a, c, g, or t
  misc_feature (1116)..(1116): n is a, c, g, or t
  misc_feature (1121)..(1121): n is a, c, g, or t
  misc_feature (1127)..(1127): n is a, c, g, or t
  misc_feature (1129)..(1129): n is a, c, g, or t
  misc_feature (1131)..(1131): n is a, c, g, or t
  misc_feature (1136)..(1136): n is a, c, g, or t
  misc_feature (1144)..(1144): n is a, c, g, or t
  misc_feature (1152)..(1152): n is a, c, g, or t
  misc_feature (1158)..(1158): n is a, c, g, or t
  misc_feature (1160)..(1160): n is a, c, g, or t
  misc_feature (1167)..(1167): n is a, c, g, or t
  misc_feature (1172)..(1172): n is a, c, g, or t
tagagaaattactatgagaggatcgcatcaccatcaccatcacggatcctatttaggtgacactatagaatcgtcgacccacgcgtccgagggcgtgcggagtttggctgctccggggttagcaggtgagcctgcgatgcgcgggaagacgttccgctttgaaatgcagcgggatttggtgagtttcccgctgtctccagcggtgcgggtgaagctggtgtctgcggggttccagactgctgaggaactcctagaggtgaaaccctccgagcttagcaaagaagttgggatatctaaagcagaagccttagaaactctgcaaattatcagaagagaatgtctcacaaataaaccaagatatgctggtacatctgagtcacacaagaagtgtacagcactggaacttcttgagcaggagcatacccagggcttcataatcaccttctgttcagcactagatgatattcttgggggtggagtgcccttaatgaaaacaacagaaatttgtggtgcaccaggtgttggaaaaacacaattatgtatgcagttggcagtagatgtgcagataccagaatgttttggaggagtggcaggtgaagcagtttttattgatacagagggaagttttatggttgatagagtggtagaccttgctactgcctgcattcagcaccttcagcttatagcagaaaaacacaagggagaggaacaccgaaaagctttggaggatttcactcttgataatattctttctcatatttattattttcgctgtcgtgactacacagagttactggcacaagtttatcttcttccagatttcctttcanaacactcaaaaggttccgactagtgatagtggatggtattgcttttccatttcgtcatgacctanatgacctgtctcttcntactcggnttattaatggcctaccccaccaaatgatcagccttgcaaatantcncagattagctgtattttacccatcaanganaccaanattgntagaaatcnggcttgctgttcctgcntagggaantngggaantgctgctcaanacggttatntttcnttggaaccaaancaaaggtggncactttgtanatccccccccnaagangcccantntntttcnatcaaccncgggattnaaaaancngtttttnttcgngtgt

SEQ ID NO: 279 - DNA, 949 bp, Homo Sapiens
ctatgagaggtcgcatcaccatcaccatcacggatcctatttaggtgacactatagaatcgtcgacccacgcgtccgcggacgcgtgggtgacaactgaagttgaaaaaatcaagacgacagtgaaggagtcagccacagaggagaagctgacccctgtgttgctggctaaacagctggcagccctgaagcagcagctggttgcttcccacctggagaagctgctgggaccagatgctgcaatcaaccttaccgaccccgatggcgccctggctaagcgcctactactgcagctggaagcaacaaagaacagcaaagggggatcagggggaaaaaccactgggacccccccagatagcagccttgtcacttatgaactacattctcggcctgagcaggacaagttctctcaagctgccaaagtcgcagaacttgaaaagcgcctgacagagctggagacagctgtacgttgtgatcaggatgctcagaatcccctttctgcaggtctacagggagcctgtctcatggagactgtagagctgttgcaagcaaaggtgagcgccctagaccttgcagttttggatcaagtggaggctcggctacagagtgtcctgggaaaggtgaacgagattgccaagcataaagcctctgtagaagatgcagatacacaaagcaaggtgcaccagctatatgaaactatacagcgctggagccccattgcctccaccctccctgagctggtgcagagacttgtcaccatcaagcagctgcacgagcaagccatgcagtttggtcagctcctgacacacttggataccacccagcagatgattgctaattccttgaaggacaataccaccctcttgacccaggtgcagacaaccatgcgtgaaaacctggccacagttgaggggaactttgccagcattgatgaacggatgaagaagctg

SEQ ID NO: 280 - DNA, 630 bp, Homo Sapiens
tagagaaattactatgagaggatcgcatcaccatcaccatcacggatcctatttaggtgacactatagaatcgtcgacccacgcgtccgcccacgcgtccggaggcctacacgccgccgcttgtgctgcagccatgtctctagtgatccctgaaaagttccagcatattttgcgagtactcaacaccaacatcgatgggcggcggaaaatagcctttgccatcactgccattaagggtgtgggccgaagatatgctcatgtggtgttgaggaaagcagacattgacctcaccaagagggcgggagaactcactgaggatgaggtggaacgtgtgatcaccattatgcagaatccacgccagtacaagatcccagactggttcttgaacagacagaaggatgtaaaggatggaaaatacagccaggtcctagccaatggtctggacaacaagctccgtgaagacctggagcgactgaagaagattcgggcccatagagggctgcgtcacttctggggccttcgtgtccgaggccagcacaccaagaccactggccgccgtggccgcaccgtgggtgtgtccaagaagaaataagtctgtaggccttgtctgttaataaatagtttatatac

SEQ ID NO: 281 - DNA, 884 bp, Homo Sapiens
  misc_feature (651)..(651): n is a, c, g, or t
  misc_feature (664)..(664): n is a, c, g, or t
  misc_feature (705)..(705): n is a, c, g, or t
  misc_feature (711)..(711): n is a, c, g, or t
  misc_feature (715)..(715): n is a, c, g, or t
  misc_feature (755)..(755): n is a, c, g, or t
  misc_feature (783)..(783): n is a, c, g, or t
  misc_feature (793)..(793): n is a, c, g, or t
  misc_feature (803)..(803): n is a, c, g, or t
  misc_feature (816)..(816): n is a, c, g, or t
  misc_feature (828)..(828): n is a, c, g, or t
  misc_feature (836)..(836): n is a, c, g, or t
  misc_feature (838)..(838): n is a, c, g, or t
  misc_feature (842)..(842): n is a, c, g, or t
  misc_feature (846)..(846): n is a, c, g, or t
  misc_feature (851)..(851): n is a, c, g, or t
  misc_feature (854)..(854): n is a, c, g, or t
  misc_feature (860)..(860): n is a, c, g, or t
  misc_feature (864)..(864): n is a, c, g, or t
  misc_feature (866)..(866): n is a, c, g, or t
  misc_feature (871)..(871): n is a, c, g, or t
  misc_feature (876)..(876): n is a, c, g, or t
  misc_feature (878)..(878): n is a, c, g, or t
atagagagaattactatgagaggatcgcatcaccatcaccatcacggatcctatttaggtgacactatagaatcgtcgacccacgcgtccgagaactgctccaccccgctggctctgcccactcgagacctcaatgccacctttgatctctctgaggagcctccctcaaagcccagtttccatgaatgcattggctgggacaaaataccccaggagctgagcaggctggaccagcccttcatccccagggcacctgtgcccctgttcaccatgaagggccccaagccaacatcttccctccctgggacctctgcctgcaagaagaagcgcgttgcgagttcctcagtctcccatggccgcagccgcatcgcccgcctccccagcagcactttgaagaggccagctgggccccttgtactcccaggtgactggcactagggacagggatagcctgggccatggaggccgatgaagacaagaaggaggaggggacggggagctgatacccaaaagaaaggagggcctagggtattgccaagcatctcagggatgctgctgatgagacaggtgggaggtgggctggaggacggggacagagcgtcactttccttcctcgctgcactccccgccacccatccaactggcctgcanagctgcccttgantcccctgtgccctagcaaccggaggaatggaaaggacctcntcaggntggngagagcactctcagcagggaacggcgtcaccaaggtgtcntgaccgccagaatgtcctgaccaccaangtgtcctaanctaaccggcncctctgctggaanaccccctcttgnaacctgtnanccancctngcacnaanaagctngaancntgtcnttccntnaccttg

SEQ ID NO: 282 - DNA, 1039 bp, Homo Sapiens
  misc_feature (7)..(7): n is a, c, g, or t
  misc_feature (218)..(218): n is a, c, g, or t
  misc_feature (244)..(244): n is a, c, g, or t
  misc_feature (457)..(457): n is a, c, g, or t
  misc_feature (798)..(798): n is a, c, g, or t
  misc_feature (842)..(842): n is a, c, g, or t
  misc_feature (891)..(891): n is a, c, g, or t
  misc_feature (897)..(897): n is a, c, g, or t
  misc_feature (905)..(905): n is a, c, g, or t
  misc_feature (916)..(916): n is a, c, g, or t
  misc_feature (942)..(942): n is a, c, g, or t
  misc_feature (998)..(998): n is a, c, g, or t
  misc_feature (1003)..(1003): n is a, c, g, or t
  misc_feature (1010)..(1010): n is a, c, g, or t
  misc_feature (1014)..(1014): n is a, c, g, or t
  misc_feature (1024)..(1024): n is a, c, g, or t
atagagnaattactatgagaggatcgcatcaccatcaccatcacggatcctatttaggtgacactatagaatcgtcgacccacgcgtccgaaaacagacaacaacctccaatttcccttatatgctcccagcgaactgctgtctcacgaaagagaaataaaaagaaaaaagtgcccccaaagactgtggaacctcttactgtgaaacagaagcccagngggtcagagatggagaaaaagtcggnggtggcctctgagctatctgctctccaggcagccgagcacacctccccggaggagagccgcgttctaggattcggcattgttctggaatcaccttcctcagatccagaagtacaacttgctgaaggctttgacgtgtttatgcctaaatctcagctggactctatattgtcaaactacactcgctcaggaagccttctgtttagaaaactggngtgtgcgttttttgatgacaagactttggctaactccttacccaatgggaagaggaaaagaggactcaatgacaaccggaaaggactagaccaaaatattgtgggtgcaataaaagtcttcacagaaaagtactgtacagctaaccatgtggataagcttcctggcccaagagattgggtgcagattctacaggatcaaattaaactggccagaagaaggttaaaaagaggctcaggtatgactaaggtgcagaaaaataattggagaagcacttatgaattcttagactttataaagtacaatacttggctctaggttatttcagcatcttgtcttttgnaaggagagactgtttataatatgctgatttgctctcaaaggtcnttattcaaatgaattttgaaaactcaccttcagactaaatagtaaaaanttatgnccaggccncttggcattgnaatagtacaagggaaaaaaagattgnctaatctcatttgggggcctaaaggctggccatatatgaaaaaccgggttctctcnttttnatgggtncgcnttctggccgncctattggatttttt

SEQ ID NO: 283 - DNA, 843 bp, Homo Sapiens
atgagaggtcgcatcaccatcaccatcacggatcctatttaggtgacactatagaatcgtcgacccacgcgtccggaggcggcggcggcggcggcgggagcgggagcgggcggcgagtggggagcggggccgggagtggagcagccgccgcggcgggactggaccgagcctcgccggcgcgcacctgcccgcagcgcccgcggagcgcgcagcgcggcccgagcgcgacgacctgccgagcggcggccgaggcggcggtgtgggcgcgtcaggccgcgacgagggcgctgagacaaatttacatgtattggagaccagaccagaagcccttctgaattaagatctcacattcttgaaggtggcattgaagagcactaagatcggaagatgagtgagcttgaccagttacggcaggaggccgagcaacttaagaaccagattcgagacgccaggaaagcatgtgcagatgcaactctctctcagatcacaaacaacatcgacccagtgggaagaatccaaatgcgcacgaggaggacactgcgggggcacctggccaagatctacgccatgcactggggcacagactccaggcttctcgtcagtgcctcgcaggatggtaaacttatcatctgggacagctacaccaccaacaaggtccacgccatccctctgcgctcctcctgggtcatgacctgtgcatatgccccttctgggaactatgtggcctgcggtggcctggataacatttgctccatttacaatctgaaaactcgtgaggggaacgtgcgcgtgagtcgtgagctggcagacacacaaggttacctgtcctgctgccgattcctg

SEQ ID NO: 284 - DNA, 925 bp, Homo Sapiens
aattaactatgagaggatcgcatcaccatcaccatcacggatcctatttaggtgacactatagaatcgtcgacccacgcgtccggccagctgtgcgaccacgcgtgctcgcaggccagcaagctcaagcgccacatgaagacgcacatgcacaaggccggctcgctggccggccgctccgacggtgacttccgccaccacgagagcgacccgtcgctgggccacgagccggaggaggaggacgaggaggaggaggaggaggaggaggagctgctactggagaacgagagccggcccgagtcgagcttcagcatggactcggagctgagccgcaaccgcgagaacggcggtggtggggtgcccggggtcccgggcgcggggggcggcgcggccaaggcgctggctgacgagaaggcgctggtgctgggcaaggtcatggagaacgtgggcctaggcgcactgccgcagtacggcgagctcctggccgacaagcagaagcgcggcgccttcctgaagcgtgcggcgggcggcggggacgcgggcgacgacgacgacgcgggcggctgcggggacgcgggcgcgggcggcgcggtcaacgggcgcgggggcggcttcgcgccaggcaccgagcccttccccgggctcttcccgcgcaagcccgcgccgctgcccagccccgggctcaacagcgccgccaagcgcatcaaggtggagaaggacctggagctgccgcccgccgcgctcatcccgtccgagaacgtgtactcgcagtggctggtgggctacgcggcgtcgcggcacttcatgaaggaccccttcctgggcttcacggacgcacgacagtcgcccttcgccacgtcgtccgagcactcgtccgagaacggcagcctgcgcttctccacgccgcccggggacctgctggacgg

SEQ ID NO: 285 - DNA, 1082 bp, Homo Sapiens
  misc_feature (850)..(850): n is a, c, g, or t
  misc_feature (867)..(867): n is a, c, g, or t
  misc_feature (892)..(892): n is a, c, g, or t
  misc_feature (899)..(899): n is a, c, g, or t
  misc_feature (911)..(912): n is a, c, g, or t
  misc_feature (915)..(915): n is a, c, g, or t
  misc_feature (919)..(919): n is a, c, g, or t
  misc_feature (932)..(932): n is a, c, g, or t
  misc_feature (934)..(934): n is a, c, g, or t
  misc_feature (948)..(948): n is a, c, g, or t
  misc_feature (956)..(956): n is a, c, g, or t
  misc_feature (975)..(975): n is a, c, g, or t
  misc_feature (980)..(980): n is a, c, g, or t
  misc_feature (989)..(989): n is a, c, g, or t
  misc_feature (1001)..(1001): n is a, c, g, or t
  misc_feature (1016)..(1016): n is a, c, g, or t
  misc_feature (1019)..(1019): n is a, c, g, or t
  misc_feature (1029)..(1029): n is a, c, g, or t
  misc_feature (1033)..(1033): n is a, c, g, or t
  misc_feature (1045)..(1045): n is a, c, g, or t
  misc_feature (1050)..(1050): n is a, c, g, or t
  misc_feature (1053)..(1055): n is a, c, g, or t
  misc_feature (1060)..(1061): n is a, c, g, or t
  misc_feature (1066)..(1066): n is a, c, g, or t
  misc_feature (1071)..(1071): n is a, c, g, or t
  misc_feature (1079)..(1079): n is a, c, g, or t
  misc_feature (1081)..(1082): n is a, c, g, or t
tagagagaattactatgagaggatcgcatcaccatcaccatcacggatcctatttaggtgacactatagaatcgtcgacccacgcgtccgggtcggaaaaaagggagaagaaaccggcaccctctctgagaggcaacagaagcagcaattgtttcagcgaaaaaagcagcaagggagggagtgaaggaaaaaagcaaaaaagggggcgacacgcaagtgcctgtaggggtgaaaggagcagggaccggcgatctagggggggatcagctacaaaagaaactgtcactgggagcggtgcggccaaggaggaagcagtgctgccaggctctgctccagggcacagctggctggcggctgccctgtccgcagcaaaggggcacaggccggggaccgcgagaggtggcaaagtggcaccgggcgccgaggctgctgagcgctcgccgagacggcgaccggactggctgccccggaactgcggcgactctccctactcagaacttggcctacgtttcccaggactctccccatctccagaggcccccacaaaaccgggaaaggaaggaaaggacagcggcggcagcagctcaatgagtgcctacagcagaaagcctgaacgagctcggtcgtaggcgggaagttcccgggggggctgcccagtgcagccgcaatgctgccgcgagctgccccagcagtccgggctccgtagacgctttccgcatcactctccttcctcgggctgccgggagtcccgggacctggcggggccggcatgacgggcttctcgggggcccgccgcacgcccggcagcctccggagacgcgcgccgagcccggctcccacggcctctgangctcggcgggggctgcngctgcctggcgggcgggctccgganctttctngagcggcattannccncggnttggccccggacncnaccaaaggctcttntggaaaancccaaaacactgggcatcnttacnacctgtaanttgaggccaccnaattgctactcccgntcnccttttggcnattntttttttaaccntccgnaannnttcannatccnacccnccgggggntnn

SEQ ID NO: 286 - DNA, 943 bp, Homo Sapiens
  misc_feature (854)..(854): n is a, c, g, or t
  misc_feature (857)..(857): n is a, c, g, or t
  misc_feature (876)..(876): n is a, c, g, or t
  misc_feature (889)..(889): n is a, c, g, or t
  misc_feature (917)..(917): n is a, c, g, or t
  misc_feature (927)..(927): n is a, c, g, or t
tagagaaattaactatgagaggatcgcatcaccatcaccatcacggatcctatttaggtgacactatagaatcgtcgacccacgcgtccggactcctgggcatccaccatgatgctgtcatcttcctggccgagcagctccccggagcccagcgttgccagcactataagttccgttaccaccagcagggagagggccaggaggagccgcccctgaatccccatggggctgctcgggcagaggtctatctccggaagtgcacctttgacatgttcaacttcctggcctcccagcaccgggtgctccctgagggggccacctgtgatgaggaagaggatgaggtgcagctcaggtcaaccagacgtgccaccagcctggagctgcccatggccatgcgttttcgtcaccttaagaagacgtccaaagaagctgtgggtgtctacagatcagccatccacgggcgaggcctgttctgtaagcgcaacatcgacgcgggggagatggtcatcgagtactctggcattgtcatccgctcggtgttgactgacaagcgggagaagttctacgatgggaagggcatcgggtgctatatgttccgcatggatgactttgatgtagtggacgccacgatgcatggcaatgccgcccgcttcatcaaccactcctgtgagcccaactgcttctctcgggtcatccacgtggagggccagaaacacattgttatcttcgccctgcgccgcatcctgcgtggtgaggagctcacctacgactacaagttccccatcgaggatgccagcaacaagctgccctgcaactgtggcgccaagcgctgccgtcggttccttaactgaggncgnggttgcccaccacgacccntcacacctcctgntgccggtcgctgccatcttgccccctancctggggggntcccctaacccccttc

SEQ ID NO: 287 - DNA, 717 bp, Homo Sapiens
  misc_feature (530)..(530): n is a, c, g, or t
  misc_feature (543)..(543): n is a, c, g, or t
  misc_feature (560)..(560): n is a, c, g, or t
  misc_feature (565)..(566): n is a, c, g, or t
  misc_feature (577)..(577): n is a, c, g, or t
  misc_feature (581)..(581): n is a, c, g, or t
  misc_feature (586)..(586): n is a, c, g, or t
  misc_feature (588)..(588): n is a, c, g, or t
  misc_feature (622)..(622): n is a, c, g, or t
  misc_feature (625)..(625): n is a, c, g, or t
  misc_feature (641)..(641): n is a, c, g, or t
  misc_feature (646)..(646): n is a, c, g, or t
  misc_feature (653)..(653): n is a, c, g, or t
  misc_feature (661)..(661): n is a, c, g, or t
  misc_feature (663)..(663): n is a, c, g, or t
  misc_feature (669)..(669): n is a, c, g, or t
  misc_feature (673)..(673): n is a, c, g, or t
  misc_feature (683)..(683): n is a, c, g, or t
  misc_feature (685)..(685): n is a, c, g, or t
  misc_feature (688)..(688): n is a, c, g, or t
  misc_feature (690)..(690): n is a, c, g, or t
  misc_feature (695)..(695): n is a, c, g, or t
  misc_feature (698)..(698): n is a, c, g, or t
  misc_feature (702)..(702): n is a, c, g, or t
  misc_feature (706)..(706): n is a, c, g, or t
  misc_feature (713)..(713): n is a, c, g, or t
  misc_feature (715)..(715): n is a, c, g, or t
tgagaaggatcgcatcaccatcaccatcacggatcctatttaggtgacactatagaatcgtcgacccacgcgtccggtgagggggcttggggggcctcgcctgagagagtgaggacaggctgcgggaggagctgcaggactgaggtacagaggccaggggcccagggcaggacccagcctggacttgactccctgggatcccaggaagggcacaccctttcctcaccacccgagtgagcgctgccccctcacagagacctctttgccccctgggccaggcagagcaggcgctgcggtccgggaggccccatggaggtggcggtgcccgtgaagcaggaggccgagggcctggcgctggactccccgtggcaccgcttccgccgcttccacctgggcgacgcgccgggcccgcgggaggcgctggggctgctccgcgccctgtgccgggactggctgcggcccgaggtgcacaccaaggagcagatgtttggagctgctggtgctggaacaagttcctggagcgggctgcncgccgacacgcangccttgggtgttgcagnccggnnagccgcaaagngggngaggnangccggtggccctgcctgtagggagcttctggttnagntgaccacagaagagangtctngtgaccnaaatgttngnaagggnttgnccccccctcncnttncncaacnagncaantcanttttgcngnga

SEQ ID NO: 288 - DNA, 1148 bp, Homo Sapiens
  misc_feature (1)..(1): n is a, c, g, or t
  misc_feature (5)..(5): n is a, c, g, or t
  misc_feature (894)..(894): n is a, c, g, or t
  misc_feature (897)..(897): n is a, c, g, or t
  misc_feature (900)..(900): n is a, c, g, or t
  misc_feature (936)..(936): n is a, c, g, or t
  misc_feature (947)..(947): n is a, c, g, or t
  misc_feature (950)..(950): n is a, c, g, or t
  misc_feature (955)..(955): n is a, c, g, or t
  misc_feature (957)..(957): n is a, c, g, or t
  misc_feature (966)..(966): n is a, c, g, or t
  misc_feature (968)..(968): n is a, c, g, or t
  misc_feature (973)..(973): n is a, c, g, or t
  misc_feature (992)..(992): n is a, c, g, or t
  misc_feature (1004)..(1005): n is a, c, g, or t
  misc_feature (1012)..(1012): n is a, c, g, or t
  misc_feature (1020)..(1020): n is a, c, g, or t
  misc_feature (1037)..(1037): n is a, c, g, or t
  misc_feature (1040)..(1040): n is a, c, g, or t
  misc_feature (1050)..(1051): n is a, c, g, or t
  misc_feature (1059)..(1060): n is a, c, g, or t
  misc_feature (1064)..(1064): n is a, c, g, or t
  misc_feature (1077)..(1077): n is a, c, g, or t
  misc_feature (1083)..(1084): n is a, c, g, or t
  misc_feature (1092)..(1092): n is a, c, g, or t
  misc_feature (1095)..(1095): n is a, c, g, or t
  misc_feature (1097)..(1097): n is a, c, g, or t
  misc_feature (1105)..(1105): n is a, c, g, or t
  misc_feature (1112)..(1113): n is a, c, g, or t
  misc_feature (1115)..(1115): n is a, c, g, or t
  misc_feature (1119)..(1119): n is a, c, g, or t
  misc_feature (1124)..(1124): n is a, c, g, or t
  misc_feature (1133)..(1133): n is a, c, g, or t
  misc_feature (1138)..(1138): n is a, c, g, or t
naatngagaaattactatgagaggatcgcatcaccatcaccatcacggatcctatttaggtgacactatagaatcgtcgacccacgcgtccgggccttcgggcagagctcggcgctgctgcagcaccagcgcacacacacggccgagcgcccctaccgctgcccccactgcggcaaagccttcgggcagagctccaacttgcaacaccacctgcgcatccacacgggcgagcggccctacgcctgcccgcactgctccaaggccttcggccagagctcagcgctgctccagcacctgcacgtgcattcgggcgagcgtccctatcgctgtcagctctgcgggaaggccttcggccaggcctccagcctcaccaagcacaaacgggtgcatgagggtgcagccgctgctgcagctgccgcggccgctccctatagtgagtcgtattaagcttaattagctgagcttggactcctgttgatagatccagtaatgacctcagaactccatctggatttgttcagaacgctcggttgccgccgggcgttttttattggtgagaatccaagctagcttggcgagattttcaggagctaaggaagctaaaatggagaaaaaaatcactggatataccaccgttgatatatcccaatggcatcgtaaagaacattttgaggcatttcagtcagttgctcaatgtacctataaccagaccgttcagctggatattacggcctttttaaagaccgtaaagaaaaataagcacaagttttatccggcctttattcacattcttgcccgcctgatgaatgctcatccgggaaatttcgtatggcaatgaaaaaacggtgagctggtgatatgggatagtgttcaccccttgttacaccgtttttncangancaaactgaaacgtttttcatcgctctggaagtgaanaccacgacaanttncgggnanttttctaananataanattccccaaaaatgtgggnggggttaacggnnaaaaacntggccctnattttcccttaaagggnttnattgaaaaanntgtttttnngtcncaacccaaattcnttgggnnaaatttcnccnantttttaanttaaaanngnggcnaaaangggaaaaanttttnttcccccccc

SEQ ID NO: 289 - DNA, 1075 bp, Homo Sapiens
  misc_feature (1)..(3): n is a, c, g, or t
  misc_feature (858)..(858): n is a, c, g, or t
  misc_feature (867)..(867): n is a, c, g, or t
  misc_feature (880)..(880): n is a, c, g, or t
  misc_feature (887)..(887): n is a, c, g, or t
  misc_feature (931)..(931): n is a, c, g, or t
  misc_feature (942)..(942): n is a, c, g, or t
  misc_feature (945)..(945): n is a, c, g, or t
  misc_feature (955)..(955): n is a, c, g, or t
  misc_feature (986)..(986): n is a, c, g, or t
  misc_feature (992)..(992): n is a, c, g, or t
  misc_feature (1016)..(1016): n is a, c, g, or t
  misc_feature (1029)..(1029): n is a, c, g, or t
  misc_feature (1039)..(1039): n is a, c, g, or t
  misc_feature (1048)..(1048): n is a, c, g, or t
  misc_feature (1051)..(1052): n is a, c, g, or t
  misc_feature (1056)..(1056): n is a, c, g, or t
  misc_feature (1059)..(1059): n is a, c, g, or t
  misc_feature (1061)..(1061): n is a, c, g, or t
  misc_feature (1065)..(1065): n is a, c, g, or t
  misc_feature (1067)..(1068): n is a, c, g, or t
  misc_feature (1075)..(1075): n is a, c, g, or t
nnntagagaaaattactatgagaggatcgcatcaccatcaccatcacggatcctatttaggtgacactatagaatcgtcgacccacgcgtccgcggacgcgtgggtgtatttggaacattatctggacagtattgaaaaccttccctttgaattacagagaaactttcagctcatgagggacctagaccaaagaacagaggacctgaaggctgaaattgacaagttggccactgagtatatgagtagtgcccgcagcctgagctccgaggaaaaattggcccttctcaaacagatccaggaagcctatggcaagtgcaaggaatttggtgacgacaaggtgcagcttgccatgcagacctatgagatggtggacaaacacattcggcggctggacacagacctggcccgttttgaggctgatctcaaggagaaacagattgagtcaagtgactatgacagctcttccagcaaagaaggccggactcaaaaggagaagaaagctgctcgtgctcgttccaaagggaaaaactcggatgaagaagcccccaagactgcccagaagaagttaaagctcgtgcgcacaagtcctgagtatgggatgccctcagtgacctttggcagtgtccacccctctgatgtgttggatatgcctgtggatcccaacgaacccacctattgcctttgtcaccaggtctcctatggagagatgattggctgtgacaaccctgattgttccattgagtggttccattttgcctgtgtggggctgacaaccaagcctcgggggaaatggttttgcccacgctgctccccagaacggaagaagaaatagataagggccttggattccaacacantttcttccncatcccctgactngggctantgggcaaaagaaatgcctgtgctggggccaggggttcaggaagnatgggatggcncantgctgttatncctttttcctccccttttccccaattccggngctgangctgcatcaaaaccctggtaaggnagggggtgccccnaccccctaangggaatgtngtnntccnttnancccntnnccccttn

SEQ ID NO: 290 - DNA, 1008 bp, Homo Sapiens
aactatgagaggatcgcatcaccatcaccatcacggatcctatttaggtgacactatagaatcgtcgacccacgcgtccgtgatgatgcacatgcaggatcagcaacccaaggagatctgtgcgctggttgggttctgtgatgaggtgaaagagatgcccatgcagactctggtccccgccaaagtggcctccaagaatgtcatccctgccctggaactggtggagcccattaagaagcacgaggtcccagcaaagtctgatgtttactgtgaggtgtgtgaattcctggtgaaggaggtgaccaagctgattgacaacaacaagactgagaaagaaatactcgacgcttttgacaaaatgtgctcgaagctgccgaagtccctgtcggaagagtgccaggaggtggtggacacgtacggcagctccatcctgtccatcctgctggaggaggtcagccctgagctggtgtgcagcatgctgcacctctgctctggcacgcggctgcctgcactgaccgttcacgtgactcagccaaaggacggtggcttctgcgaagtgtgcaagaagctggtgggttatttggatcgcaacctggagaaaaacagcaccaagcaggagatcctggctgctcttgagaaaggctgcagcttcctgccagacccttaccagaagcagtgtgatcagtttgtggcagagtacgagcccgtgctgatcgagatcctggtggaggtgatggatccttccttcgtgtgcttgaaaattggagcctgcccctcggcccataagcccttgttgggaactgagaagtgtatatggggcccaagctactggtgccagaacacagagacagcagcccagtgcaatgctgtcgagcattgcaaacgccatgtgtggaactaggaggaggaatattccatcttggcagaaaccacagcattggtttttttctacttgtgtgtctgggggaatgaacgcacagatctgtttgactttgttataaaaatagg

SEQ ID NO: 291 - DNA, 852 bp, Homo Sapiens
  misc_feature (1)..(3): n is a, c, g, or t
  misc_feature (245)..(245): n is a, c, g, or t
  misc_feature (547)..(547): n is a, c, g, or t
  misc_feature (578)..(578): n is a, c, g, or t
  misc_feature (612)..(612): n is a, c, g, or t
  misc_feature (629)..(629): n is a, c, g, or t
  misc_feature (649)..(649): n is a, c, g, or t
  misc_feature (663)..(663): n is a, c, g, or t
  misc_feature (675)..(675): n is a, c, g, or t
  misc_feature (684)..(684): n is a, c, g, or t
  misc_feature (691)..(691): n is a, c, g, or t
  misc_feature (713)..(713): n is a, c, g, or t
  misc_feature (720)..(720): n is a, c, g, or t
  misc_feature (723)..(723): n is a, c, g, or t
  misc_feature (732)..(732): n is a, c, g, or t
  misc_feature (748)..(748): n is a, c, g, or t
  misc_feature (751)..(751): n is a, c, g, or t
  misc_feature (761)..(761): n is a, c, g, or t
  misc_feature (768)..(768): n is a, c, g, or t
  misc_feature (778)..(778): n is a, c, g, or t
  misc_feature (780)..(781): n is a, c, g, or t
  misc_feature (795)..(795): n is a, c, g, or t
  misc_feature (799)..(799): n is a, c, g, or t
  misc_feature (804)..(806): n is a, c, g, or t
  misc_feature (808)..(808): n is a, c, g, or t
  misc_feature (815)..(815): n is a, c, g, or t
  misc_feature (817)..(817): n is a, c, g, or t
  misc_feature (843)..(843): n is a, c, g, or t
nnnctatgagaggatcgcatcaccatcaccatcacggatcctatttaggtgacactatagaatcgtcgacccacgcgtccgcgagcggcaacaagagcgttttgatggagcggctgaagaaggcaattgaagatgaaggtggtaatcctgacgaaattgaaattacctccgagggaaacaagaaaacatcaaagaggtctagcaaagggcgcaaaccagaagaagagggtgtggaagataacggnctggaggaaaactctggggatggacaggaggatgttgagaccagtctggagaacttgcaggacatcgacatcatggatatcagtgtgttggatgaagcagaaattgataatggaagcgttgcagattgtgtcgaagacgatgatgctgataacctccaggagtccctgtcggatagtagagagctagtcgagggggaaatgaaagagcttccggagcagcttcaggaacatgctatagaggacaaagaaactataaacaatttagatacttcatcatctgacttcactatattacaggaaanttgaagagccatccctggagccaggtactgnttaaatgaaaacttaccagcgggggtttggaacnattctagttttccaccntctctaatttgaattctttngattttaaaagtancctaactatagnaaacattgntccaaanggttaccatccaaaacctaccngggatcntanaagattggnaaccccggccctatcnccnaattttgggnaaggggnctccccttcncnnttttacaaaaatgntttnggtgnnnangaaaagnanccccctggcccttttttggaatttcnccggctttt

SEQ ID NO: 292 - DNA, 947 bp, Homo Sapiens
  misc_feature (3)..(4): n is a, c, g, or t
  misc_feature (6)..(11): n is a, c, g, or t
  misc_feature (13)..(13): n is a, c, g, or t
  misc_feature (15)..(15): n is a, c, g, or t
  misc_feature (273)..(273): n is a, c, g, or t
  misc_feature (276)..(276): n is a, c, g, or t
  misc_feature (797)..(797): n is a, c, g, or t
  misc_feature (816)..(816): n is a, c, g, or t
  misc_feature (863)..(863): n is a, c, g, or t
  misc_feature (879)..(879): n is a, c, g, or t
  misc_feature (906)..(906): n is a, c, g, or t
  misc_feature (918)..(918): n is a, c, g, or t
  misc_feature (924)..(924): n is a, c, g, or t
  misc_feature (934)..(936): n is a, c, g, or t
  misc_feature (939)..(939): n is a, c, g, or t
  misc_feature (942)..(942): n is a, c, g, or t
  misc_feature (947)..(947): n is a, c, g, or t
atnntnnnnnnantngagagattactatgagaggatcgcatcaccatcaccatcacggatcctatttaggtgacactatagaatcgtcgacccacgcgtccgatcatctgctcctgcttctacacacagccgcaccccaataccgtctaccagtacggggacatggaggtgaagcagctggacaagcgggcctcaggccagagcttcgaggtcatcctcaagtccccttctgacctgtccccagagagccctatgctctcctccccacccaanaanaaggacacctccctggaggagctgcaaaagcggctggaggcagccgaggagcggaggaagacgcaggaggcgcaggtgctgaagcagctggcggagcggcgcgagcacgagcgcgaggtgctgcacaaggcgctggaggagaataacaacttcagccgccaggcggaggagaagctcaactacaagatggagctcagcaaggagatccgcgaggcacacctggccgcactgcgcgagcggctgcgcgagaaggagctgcacgcggccgaggtgcgcaggaacaaggagcagcgagaagagatgtcgggctaagggcccgggacgggcggcgcccatcctgcgacggaacacgttcgggttttggttttgtttcgttcacctctgtctagatgcaacttttgttcctcctcccccaccccagcccccagcttcatgcttctcttccgcactcagccgccctgccctgtcctcgtggtgagtcgctgaccacggcttcccctgcaggagccgccgggcgtganacgcggtccctcggtgcanacaccaggccgggcgcggctgggtcccccgggggccctgtgaaaaangtggcggtgaccgtgntaaacccagggcggtggcgtgggatcncgggtccttacnctgggntgtctggtcnnnacntgnaggtn

SEQ ID NO: 293 - DNA, 1268 bp, Homo Sapiens
  misc_feature (1)..(1): n is a, c, g, or t
  misc_feature (3)..(3): n is a, c, g, or t
  misc_feature (826)..(826): n is a, c, g, or t
  misc_feature (851)..(851): n is a, c, g, or t
  misc_feature (867)..(867): n is a, c, g, or t
  misc_feature (908)..(908): n is a, c, g, or t
  misc_feature (952)..(952): n is a, c, g, or t
  misc_feature (968)..(968): n is a, c, g, or t
  misc_feature (970)..(970): n is a, c, g, or t
  misc_feature (985)..(985): n is a, c, g, or t
  misc_feature (987)..(987): n is a, c, g, or t
  misc_feature (992)..(992): n is a, c, g, or t
  misc_feature (1009)..(1009): n is a, c, g, or t
  misc_feature (1017)..(1017): n is a, c, g, or t
  misc_feature (1048)..(1048): n is a, c, g, or t
  misc_feature (1053)..(1053): n is a, c, g, or t
  misc_feature (1069)..(1069): n is a, c, g, or t
  misc_feature (1082)..(1082): n is a, c, g, or t
  misc_feature (1094)..(1094): n is a, c, g, or t
  misc_feature (1096)..(1096): n is a, c, g, or t
  misc_feature (1098)..(1098): n is a, c, g, or t
  misc_feature (1100)..(1100): n is a, c, g, or t
  misc_feature (1124)..(1124): n is a, c, g, or t
  misc_feature (1127)..(1127): n is a, c, g, or t
  misc_feature (1141)..(1141): n is a, c, g, or t
  misc_feature (1144)..(1144): n is a, c, g, or t
  misc_feature (1146)..(1146): n is a, c, g, or t
  misc_feature (1148)..(1148): n is a, c, g, or t
  misc_feature (1153)..(1154): n is a, c, g, or t
  misc_feature (1162)..(1162): n is a, c, g, or t
  misc_feature (1171)..(1171): n is a, c, g, or t
  misc_feature (1176)..(1177): n is a, c, g, or t
  misc_feature (1186)..(1186): n is a, c, g, or t
  misc_feature (1194)..(1194): n is a, c, g, or t
  misc_feature (1198)..(1199): n is a, c, g, or t
  misc_feature (1206)..(1206): n is a, c, g, or t
  misc_feature (1209)..(1209): n is a, c, g, or t
  misc_feature (1213)..(1213): n is a, c, g, or t
  misc_feature (1221)..(1221): n is a, c, g, or t
  misc_feature (1223)..(1223): n is a, c, g, or t
  misc_feature (1234)..(1234): n is a, c, g, or t
  misc_feature (1236)..(1236): n is a, c, g, or t
  misc_feature (1244)..(1244): n is a, c, g, or t
  misc_feature (1255)..(1256): n is a, c, g, or t
  misc_feature (1258)..(1258): n is a, c, g, or t
  misc_feature (1266)..(1266): n is a, c, g, or t
nantagagaaattactatgagaggatcgcatcaccatcaccatcacggatcctatttaggtgacactatagaatcgtcgacccacgcgtccgaagaaaaccagcgcaaggaatcctctagttttaagactgaagatggaaaaagtattttatctgccttagacaaaggctctacacatactgcatgctcaggacccatagatgaactattagacatgaaatctgaggaaggtgcttgcctgggaccagtggcagggaccccggaacctgaaggtgctgacaaagatgacctgctgctgttgagtgagatcttcaatgcttcctccttggaagagggcgagttcagcaaagagtgggccgctgtgtttggagacggccaagtgaaggagccagtgcccactatggccctgggagagccagaccccaaggcccagacaggctcaggtttccttccttcgcagcttttagaccaaaatatgaaagacttacaggcctcgctacaagaacctgctaaggctgcctcagacctgactgcctggttcagcctcttcgctgacctcgacccactctcaaatcctgatgctgttgggaaaaccgataaagaacacgaattgctcaatgcatgaatctgtacccttcgggagggcactcacatgccgcccccagcagctcccctgggggctagcagaagtataaagtgatcagtatgctgttttaataattatgtgccattttaataaaatgaaagggtcaacggccctgtttatattggtataattatttactcttatttggtataaaagggttttcgtgtatctctatgtggnatctaaataatacaggattgtctanaagcggttttccaggnccaccgctctcctgcctacatcccatcatggctgctgcggnggtcactggggctacccgtgagatccaagtttgaaatccaaaancctactttgatggtangntttgaaatgacggtntnctaanagccctccaaaaggccngcagggangcctaaccaaaagcttttaaattggccttcnttttnttgccccccaaccctntgttccccctttnggaagaagggcntntnanggaaaaatttccctttttctggcnaangcccacctttccanggnancncctgnnataaaaantcttggccnaaccnnaaaaaattngtcccccnacannaaggggnccngggngggccccncngttttcccccncngggggaangaaatggggtnntntcctcccngg

SEQ ID NO: 294 - DNA, 615 bp, Homo Sapiens
  misc_feature (6)..(6): n is a, c, g, or t
  misc_feature (45)..(45): n is a, c, g, or t
  misc_feature (55)..(55): n is a, c, g, or t
tcgagnaatataaaaaattatttgctttgtgagcggataacaatntaatagattnattgtgagcggataacaatttacacagaattcattaaagaggagaaattaactatgagaggatcgcatcaccatcaccatcacggatcctatttaggtgacactatagaatcgtcgacccacgcgtccgggaagacgctgctggtgaaacggctgcaggaggtgagctcccgggatgggaaaggcgacctgggggagccgcccccgacacggcccacggtgggcaccaatcttactgacatcgtggcacagagaaagatcaccatccgggagcttggggggtgcatgggccccatctggtccagttactatggaaactgccgttctctcctgtttgtgatggacgcctctgaccccacccagctctctgcatcctgtgtgcagctcttaggtctcctttctgcagaacaacttgcagaagcatcggtgctgatactcttcaataaaatcgacctaccctgttacatgtccacggaggagatgaagtcattaatcaggcttccagacatcattgcttgtgccaagcagaacatcaccacggcagaaatcagcgcccgtgaa

SEQ ID NO: 295 - DNA, 866 bp, Homo Sapiens
  misc_feature (15)..(15): n is a, c, g, or t
  misc_feature (17)..(17): n is a, c, g, or t
  misc_feature (21)..(21): n is a, c, g, or t
  misc_feature (692)..(692): n is a, c, g, or t
  misc_feature (701)..(701): n is a, c, g, or t
  misc_feature (709)..(709): n is a, c, g, or t
  misc_feature (733)..(733): n is a, c, g, or t
  misc_feature (746)..(746): n is a, c, g, or t
  misc_feature (782)..(782): n is a, c, g, or t
  misc_feature (788)..(788): n is a, c, g, or t
  misc_feature (792)..(792): n is a, c, g, or t
  misc_feature (799)..(799): n is a, c, g, or t
  misc_feature (842)..(842): n is a, c, g, or t
  misc_feature (854)..(854): n is a, c, g, or t
  misc_feature (858)..(858): n is a, c, g, or t
tattaagaggagttntnactntgagaggatcgcatacctaccatcacggatcctatttaggtgacactatagaatcgtcgacccacgcgtccgacaacaaagaagtgcacaagtctgggtacctcagctctgagcggctgatccctcaaagagtgatggaccagcacaaacttaccagggaccagtgggaggaccggatccaggtgtggcatgcggaacaccgtgggatgctcaaagataatgctatgttggaatacctgaagattgctcaggacctggaaatgtatggaatcaactatttcgagataaaaaacaagaaaggaacagacctttggcttggagttgatgcccttggactgaatatttatgagaaagatgataagttaaccccaaagattggctttccttggagtgaaatcaggaacatctctttcaatgacaaaaagtttgtcattaaacccatcgacaagaaggcacctgactttgtgttttatgccccacgtctgagaatcaacaagcggatcctgcagctctgcatgggcaaccatgagttgtatatgcgccgcaggaagcctgacaccatcgaggtgcagcagatgaaggcccaggcccgggaggagaagcatcagaagcagctggagcggcaacagctggaaacagagaagaaaaggagagaaaccgtggagagaganaaagagcanatgatgcncgagaaggaggagttgatgctgcnggctgcaggactntgaggagaagacaaagaaggcagaagagagagcttntcgggnccanatttcanagggcccctgcaacctgggagggaggaaaaggaaaccgggccncaggggggaggnccgngccccctt

SEQ ID NO: 296 - DNA, 807 bp, Homo Sapiens
  misc_feature (1)..(1): n is a, c, g, or t
  misc_feature (762)..(762): n is a, c, g, or t
  misc_feature (771)..(771): n is a, c, g, or t
  misc_feature (788)..(788): n is a, c, g, or t
  misc_feature (801)..(801): n is a, c, g, or t
  misc_feature (807)..(807): n is a, c, g, or t
nactatgagaggatcgcatcaccatcaccatcacggatcctatttaggtgacactatagaatcgtcgacccacgcgtccgcccacgcgtccgggcgacagcgggtcggcgggccgcaggagggggtcatgggtaaagactactaccagacgttgggcctggcccgcggcgcgtcggacgaggagatcaagcgggcctaccgccgccaggcgctgcgctaccacccggacaagaacaaggagcccggcgccgaggagaagttcaaggagatcgctgaggcctacgacgtgctcagcgacccgcgcaagcgcgagatcttcgaccgctacggggaggaaggcctaaaggggagtggccccagtggcggtagcggcggtggtgccaatggtacctctttcagctacacattccatggagaccctcatgccatgtttgctgagttcttcggtggcagaaatccctttgacaccttttttgggcagcggaacggggaggaaggcatggacattgatgacccattctctggcttccctatgggcatgggtggcttcaccaacgtgaactttggccgctcccgctctgcccaagagcccgcccgaaagaagcaagatcccccagtcacccacgaccttcgagtctcccttgaagagatctacagcggctgtaccaagaagatgaaaatctcccacaagcggctaaaccccgacggaaagagcattcgaaacgaagacaaaatattgaccatcgaaagtgaagaaggggnggaaaaaangaaccaaaatcactttnccccaaggaaggngaacan

SEQ ID NO: 297 - DNA, 947 bp, Homo Sapiens
  misc_feature (7)..(7): n is a, c, g, or t
  misc_feature (878)..(878): n is a, c, g, or t
  misc_feature (899)..(899): n is a, c, g, or t
  misc_feature (904)..(904): n is a, c, g, or t
  misc_feature (918)..(918): n is a, c, g, or t
  misc_feature (929)..(929): n is a, c, g, or t
  misc_feature (944)..(944): n is a, c, g, or t
tagaggnaaattactatgagaggatcgcatcaccatcaccatcacggatcctatttaggtgacactatagaatcgtcgacccacgcgtccgagaaagtgtacgacccaaagaatgaggaggacgacatgcgggagatggaggaggagcgactgcgcatgcgggagcatgtgatgaagaatgtggacaccaaccaggaccgcctcgtgaccctggaggagttcctcgcatccactcagaggaaggagtttggggacaccggggagggctgggagacagtggagatgcaccctgcctacaccgaggaagagctgaggcgctttgaagaggagctggctgcccgggaggcagagctgaatgccaaggcccagcgcctcagccaggagacagaggctctagggcggtcccagggccgcctggaggcccagaagagagagctgcagcaggctgtgctgcacatggagcagcggaagcagcagcagcagcagcagcaaggccacaaggccccggctgcccaccctgaggggcagctcaagttccacccagacacagacgatgtacctgtcccagctccagccggtgaccagaaggaggtggacacttcagaaaagaaacttctcgagcggctccctgaggttgaggtgccccagcatctgtgatcctccgggaccccagccctcaggattcctgatgctccaaggcgactgatgggcgctggatgaagtggcacagtcagcttccctgggggccggtgtcatgttgggctcctggggcgggggcacggcctggcatttcacgcattgctgccaccccagatccacctgtctccactttcacagcctccaagtctgtggctcttcccttctgtcctccgaggggnttgccttctctcgtgtccagngaggngctcagtgatcggnttaacttaaanaagcccgcccccctnccc

SEQ ID NO: 298 - DNA, 1378 bp, Homo Sapiens
  misc_feature (722)..(722): n is a, c, g, or t
  misc_feature (843)..(843): n is a, c, g, or t
  misc_feature (875)..(875): n is a, c, g, or t
  misc_feature (1351)..(1352): n is a, c, g, or t
  misc_feature (1357)..(1362): n is a, c, g, or t
gacccacccctgagaaatactagagaggacgcatcccatcaccatcacggtcgacccacgcgtccgcggacgcgtgggctggcagtggtggcggctcttcaccaaggtcaagccgctgctgcaggtgagccggcaggaggaggagatgatggccaaggaggaggagctggtgaaggtcagagagaagcagctggctgcggagaacaggctcacggagatggagacgctgcagtctcagctcatggcagagaaattgcagctgcaggagcagctccaggcagaaaccgagctgtgtgccgaggctgaggagctccgggcccgcctgaccgccaagaagcaggaattagaagagatctgccatgacctagaggccagggtggaggaggaggaggagcgctgccagcacctgcaggcggagaagaagaagatgcagcagaacatccaggagcttgaggagcagctggaggaggaggagagcgcccggcagaagctgcagctggagaaggtgaccaccgaggcgaagctgaaaaagctggaggaggagcagatcatcctggaggaccagaactgcaagctggccaaggaaaagaaactgctggaagacagaatagctgagttcaccaccaacctcacagaagaggaggagaaatctaagagcctcgccaagctcaagaacaagcatgaggcaatgatcactgacttggaagagcgcctccgcaggnaggagaagcagcgacaggagctgggagagacccgccggaagctgggagggagactccacagacctcagcgaccagatcgccgagctcaggcccagatcgcggaggctcagatgcagctggncagaaagaaagaggagctccaggccgcctggncaaagtggaaaaggaagctgcccagaagacatggcctcaagagatccgggagctggatctcagtctctgactccaggagacctggagtctgagcggctccagaataaagctgagaacagaacggaccctggggaaaactaagggctgaaaccgattgaggaccctggatcccactgccaccggactccggcaacgggacagaggggactccgaaaaaaccgccggggaggccaacccccagccccctccggatgggggaccccccgcccggggagtggggaacttggcaccaacggtgaaaacctcaagcaaacctccaaacacgggactcccccggaaagtctcggcaggaccccacccccaaggggctccctgcgttttactaaacgcccacgcacgccccgggggaaccgctccccaccaccaatccatccctctgtggagaaacacaaccaccaccccaccccccaaccaanncccannnnnnatacacgacaccgtga

SEQ ID NO: 299 - DNA, 1198 bp, Homo Sapiens
  misc_feature (955)..(955): n is a, c, g, or t
  misc_feature (959)..(959): n is a, c, g, or t
  misc_feature (1006)..(1006): n is a, c, g, or t
  misc_feature (1009)..(1009): n is a, c, g, or t
  misc_feature (1019)..(1020): n is a, c, g, or t
  misc_feature (1022)..(1022): n is a, c, g, or t
  misc_feature (1026)..(1026): n is a, c, g, or t
  misc_feature (1029)..(1029): n is a, c, g, or t
  misc_feature (1041)..(1041): n is a, c, g, or t
  misc_feature (1052)..(1052): n is a, c, g, or t
  misc_feature (1058)..(1058): n is a, c, g, or t
  misc_feature (1066)..(1066): n is a, c, g, or t
  misc_feature (1069)..(1069): n is a, c, g, or t
  misc_feature (1087)..(1087): n is a, c, g, or t
  misc_feature (1099)..(1099): n is a, c, g, or t
  misc_feature (1112)..(1112): n is a, c, g, or t
  misc_feature (1114)..(1114): n is a, c, g, or t
  misc_feature (1121)..(1121): n is a, c, g, or t
  misc_feature (1132)..(1132): n is a, c, g, or t
  misc_feature (1148)..(1148): n is a, c, g, or t
  misc_feature (1150)..(1150): n is a, c, g, or t
  misc_feature (1153)..(1153): n is a, c, g, or t
  misc_feature (1156)..(1156): n is a, c, g, or t
  misc_feature (1161)..(1161): n is a, c, g, or t
  misc_feature (1166)..(1166): n is a, c, g, or t
  misc_feature (1171)..(1171): n is a, c, g, or t
  misc_feature (1187)..(1187): n is a, c, g, or t
tagagaaattactatgagaggatcgcatcaccatcaccatcacggatcctatttaggtgacactatagaatcgtcgacccacgcgtccggcaacccaggcagccacggctgtttcggagctcaggactctaaaatggcagagcagctttctccaggaaaggcggtggatcaggtgtgcaccttccttttcaaaaagcctgggcggaaaggggctgctggacgcagaaagcgcccggcctgcgacccagagcccggagaaagcggcagcagtagcgacgaaggctgcactgtggttcgaccggaaaagaagcgggtgacccacaatccaatgatacagaagacccgtgacagtggtaaacagaaggcggcttacggcgacttgagcagcgaagaggaagaggaaaatgagcccgagagtctcggcgtggtttataaatccacccgttcggcgaaacccgtgggaccagaggatatgggagcgacagctgtctatgagctggacacagagaaagagcgcgatgcacaagccatctttgagcgcagccagaagatccaggaggagctgaggggcaaggaggatgacaagatctatcggggaatcaacaattatcagaaatacatgaagcccaaggatacgtctatgggcaatgcctcttccgggatggtgaggaagggccccatccgagcgcccgagcatctacgtgccaccgtgcgctgggattaccagcccgacatctgtaaggactacaaagagactggcttctgcggcttcggagacagctgcaaattcctccatgaccgttcagattacaagcatgggtggcagatcgaacgtgagcttgatgagggtcgctatggtgtctatgaggatgaaaactatgaagtgggaagcgatgatgaggaaataccattcagtgtttcatctgtcgccagagcttccaaaacccagttgtcnccangtgcaggcattatttctgcgagagctgtgccctgcagcattttcccnccnccccgcgctnntntgtntgngaccagcaaacnaatggcgtctncatccngcgaaaanttntttgctaaacttaaaaancttccagcttcnggaaagggggggntnccacttnccaaaaacccnattaggggcattcccntnctnagnttccnaattnttaanttaaaaaaaacgtttntttttggaaaa

SEQ ID NO: 300 - DNA, 660 bp, Homo Sapiens
  misc_feature (107)..(107): n is a, c, g, or t
  misc_feature (632)..(632): n is a, c, g, or t
tcgagaatataaaaaattatttgctttgtgagcggatacaatataatagattaattgtgagcggataacaatttacacagaattcattaaagaggagaaattaactntgagaggatcgcatcaccatcaccatcacggatcctatttaggtgacactatagaatcgtcgacccacgcgtccgacgtggtgtaccgggacctcaagctggagaacctcatgctggacaaggacgggcacattaagatcacagacttcgggctgtgcaaggaggggatcaaggacggtgccaccatgaagaccttttgcggcacacctgagtacctggcccccgaggtgctggaggacaatgactacggccgtgcagtggactggtgggggctgggcgtggtcatgtacgagatgatgtgcggtcgcctgcccttctacaaccaggaccatgagaagctttttgagctcatcctcatggaggagatccgcttcccgcgcacgcttggtcccgaggccaagtccttgctttcagggctgctcaagaaggaccccaagcagaggcttggcgggggctccgaggacgccaagggagatcatgcagcatcgcttctttgccggtatcgtgtggcagcacgtgtacganaaagaagctcagcccacccttcaagccc

SEQ ID NO: 301 - DNA, 802 bp, Homo Sapiens
  misc_feature (1)..(3): n is a, c, g, or t
  misc_feature (640)..(640): n is a, c, g, or t
  misc_feature (645)..(645): n is a, c, g, or t
  misc_feature (692)..(692): n is a, c, g, or t
  misc_feature (715)..(715): n is a, c, g, or t
  misc_feature (754)..(754): n is a, c, g, or t
  misc_feature (768)..(768): n is a, c, g, or t
nnnctatgagaggatcgcatcaccatcaccatcacggatcctatttaggtgacactatagaatcgtcgacccacgcgtccgtggagtccaagctgggatcactgcgagatgaggagtcagaggagtggcttcggcaggcatgggagcttcaggccctgagagagaagacagaaattcagaaaacggagtggaaaagaaaagtgaaggaactgcatgaagagcacatggctgagaagaaagagatccagtccttgtctctcaggaaggtggaagggatccacaaggtgccaaaggctgtggacacagaggaggactctccagaggaagagatggaggactcccaggatgaacagcacaaggtgctggcagctctgaggcgtaaccccactttgctgaagcacttcagaccaatcctggaggacaccctggaagagaagctcgaaagcatggggataaggaagtcaaaagccagcagagcgcactggtcaccagagaggcccagccaaagaccaggaccctgcaggtggccttgccatccacaccggcagagccacccccaccaactcgtcagagccatggcagccatggctccagcctgacccaggtgtccgcccccgctccacaccccgaactgcatggnacccntccagcacccctccttcctcggggcccgggatgagcacgccccccgnttcagtttctgaagaggactcanagggagaccgtgtgcagcgtggtgtctctacagcccccnaaaagttcctttcnaggaatggtgcccccggccccgaggaaggactgg

SEQ ID NO: 302 - DNA, 1169 bp, Homo Sapiens
  misc_feature (820)..(820): n is a, c, g, or t
  misc_feature (850)..(850): n is a, c, g, or t
  misc_feature (852)..(852): n is a, c, g, or t
  misc_feature (865)..(865): n is a, c, g, or t
  misc_feature (925)..(925): n is a, c, g, or t
  misc_feature (934)..(934): n is a, c, g, or t
  misc_feature (936)..(936): n is a, c, g, or t
  misc_feature (953)..(953): n is a, c, g, or t
  misc_feature (962)..(962): n is a, c, g, or t
  misc_feature (974)..(974): n is a, c, g, or t
  misc_feature (982)..(982): n is a, c, g, or t
  misc_feature (996)..(996): n is a, c, g, or t
  misc_feature (1005)..(1005): n is a, c, g, or t
  misc_feature (1012)..(1012): n is a, c, g, or t
  misc_feature (1018)..(1018): n is a, c, g, or t
  misc_feature (1041)..(1041): n is a, c, g, or t
  misc_feature (1044)..(1044): n is a, c, g, or t
  misc_feature (1050)..(1050): n is a, c, g, or t
  misc_feature (1055)..(1056): n is a, c, g, or t
  misc_feature (1068)..(1069): n is a, c, g, or t
  misc_feature (1073)..(1074): n is a, c, g, or t
  misc_feature (1077)..(1077): n is a, c, g, or t
  misc_feature (1082)..(1082): n is a, c, g, or t
  misc_feature (1085)..(1085): n is a, c, g, or t
  misc_feature (1087)..(1087): n is a, c, g, or t
  misc_feature (1097)..(1097): n is a, c, g, or t
  misc_feature (1105)..(1105): n is a, c, g, or t
  misc_feature (1109)..(1109): n is a, c, g, or t
  misc_feature (1130)..(1130): n is a, c, g, or t
  misc_feature (1135)..(1135): n is a, c, g, or t
  misc_feature (1141)..(1141): n is a, c, g, or t
  misc_feature (1143)..(1143): n is a, c, g, or t
  misc_feature (1145)..(1145): n is a, c, g, or t
  misc_feature (1160)..(1160): n is a, c, g, or t
  misc_feature (1169)..(1169): n is a, c, g, or t
agaaattactatgagaggatcgcatcaccatcaccatcacggatcctatttaggtgacactatagaatcgtcgacccacgcgtccgctcctgttcgacagtcagccgcatcttcttttgcgtcgccagccgagccacatcgctcagacaccatggggaaggtgaaggtcggagtcaacggatttggtcgtattgggcgcctggtcaccagggctgcttttaactctggtaaagtggatattgttgccatcaatgaccccttcattgacctcaactacatggtttacatgttccaatatgattccacccatggcaaattccatggcaccgtcaaggctgagaacgggaagcttgtcatcaatggaaatcccatcaccatcttccaggagcgagatccctccaaaatcaagtggggcgatgctggcgctgagtacgtcgtggagtccactggcgtcttcaccaccatggagaaggctggggctcatttgcaggggggagccaaaagggtcatcatctctgccccctctgctgatgcccccatgttcgtcatgggtgtgaaccatgagaagtatgacaacagcctcaagatcatcagcaatgcctcctgcaccaccaactgcttagcacccctggccaaggtcatccatgacaactttggtatcgtggaaggactcatgaccacagtccatgccatcactgccacccagaagactgtggatggcccctccgggaaactgtggcgtgatggccgcggggctctccagaacatcatccctgcctctactggcgctgccaaggctgtgggcaaggtcatccctganctgaacgggaagctcactggcatggccttncngtgtccccactgncaacgtgtcagtggtggaccctgacctgccgtctaaaaaaacctgcccaaatatgatganttcaaaaangnggtgaaacaggcgtcgnaaggccccntcaagggcatcnggggctanactgaacaccaggnggtctcctntgaattnaaaagngaaccccactcctcccctttgangcngggggnggatnnccctcaaaaacnntttnncangcttnttncngggaagaaanaaatttgnctanacaaaaggggggggaaccttnggccnaatggncncnaagaaaaaaaacccngggaacccn

SEQ ID NO: 303 - DNA, 902 bp, Homo Sapiens
  misc_feature (2)..(2): n is a, c, g, or t
  misc_feature (550)..(550): n is a, c, g, or t
  misc_feature (571)..(571): n is a, c, g, or t
  misc_feature (632)..(632): n is a, c, g, or t
  misc_feature (640)..(640): n is a, c, g, or t
  misc_feature (655)..(655): n is a, c, g, or t
  misc_feature (705)..(705): n is a, c, g, or t
  misc_feature (710)..(710): n is a, c, g, or t
  misc_feature (736)..(736): n is a, c, g, or t
  misc_feature (740)..(740): n is a, c, g, or t
  misc_feature (752)..(752): n is a, c, g, or t
  misc_feature (761)..(761): n is a, c, g, or t
  misc_feature (767)..(767): n is a, c, g, or t
  misc_feature (770)..(770): n is a, c, g, or t
  misc_feature (784)..(784): n is a, c, g, or t
  misc_feature (794)..(794): n is a, c, g, or t
  misc_feature (797)..(797): n is a, c, g, or t
  misc_feature (805)..(805): n is a, c, g, or t
  misc_feature (822)..(822): n is a, c, g, or t
  misc_feature (825)..(825): n is a, c, g, or t
  misc_feature (839)..(839): n is a, c, g, or t
  misc_feature (845)..(845): n is a, c, g, or t
  misc_feature (854)..(854): n is a, c, g, or t
  misc_feature (859)..(859): n is a, c, g, or t
  misc_feature (868)..(869): n is a, c, g, or t
  misc_feature (873)..(873): n is a, c, g, or t
  misc_feature (875)..(875): n is a, c, g, or t
  misc_feature (895)..(895): n is a, c, g, or t
gntcccatcaccatcacggatcctatttaggtgacactatagaatcgtcgacccacgcgtccgggcagggaatctggcttgattggcgtgctgagacgcacctggcgcaaccctcccttctgaatcgaagttcaagtcccgcggacactgcaaccatgaaggagagacgggccccccagccagtcgtggccagatgtaagctcgttctggtcggggacgtgcagtgtgggaagaccgcgatgttgcaagtgttagcgaaggattgctatccagagacctatgtgcccaccgtgttcgaaaattacacagcctgtttggagacagaggaacagagggtggagcttagtctctgggatacctcaggatctccctactacgataatgtccgtccactctgctacagcgactcggatgcagtattactatgttttgacatcagccgtccagagacagtggacagcgcactgaagaagtggaggacagaaatcctagattattgtcccagcacccgcgttttgctcattggctgcaagacagacctgcgaaacanacctgagtactctggatggangctgttccccaccagaaggaggcgcccaatcttccttttgagcaagggtttgtgcaaatancaaaagcnagcttggggtgccanaaaaatcctaccttggaaaggcttcagctttttcacccttcaagaaaaanaagcntcccacaggcattctttttcgggaangggnatttcccaatgnctggtggtntggaanaangccctaaggccccncctggccccnaanaaagaagncccctgtgtccgaaaanccnttttctccaaaacngaactnggcttccanccctncccccaggnncggntnctggaaacctcaatttttcntttttta

SEQ ID NO: 304 - DNA, 1020 bp, Homo Sapiens
  misc_feature (711)..(711): n is a, c, g, or t
  misc_feature (790)..(790): n is a, c, g, or t
  misc_feature (807)..(807): n is a, c, g, or t
  misc_feature (862)..(862): n is a, c, g, or t
  misc_feature (876)..(876): n is a, c, g, or t
  misc_feature (888)..(888): n is a, c, g, or t
  misc_feature (897)..(897): n is a, c, g, or t
  misc_feature (943)..(943): n is a, c, g, or t
  misc_feature (952)..(952): n is a, c, g, or t
  misc_feature (954)..(954): n is a, c, g, or t
  misc_feature (960)..(960): n is a, c, g, or t
  misc_feature (981)..(981): n is a, c, g, or t
  misc_feature (984)..(984): n is a, c, g, or t
  misc_feature (991)..(991): n is a, c, g, or t
  misc_feature (993)..(993): n is a, c, g, or t
  misc_feature (996)..(998): n is a, c, g, or t
  misc_feature (1006)..(1007): n is a, c, g, or t
  misc_feature (1009)..(1009): n is a, c, g, or t
  misc_feature (1017)..(1018): n is a, c, g, or t
attagagaaattactatgagaggatcgcatcaccatcaccatcacggatcctatttaggtgacactatagaatcgtcgacccacgcgtccggggacagctaccggcgcatccttatgggcagcacgctgaggaaacgcaagatgtacgaggagttcctcagcaaggtctccatcctagagtccctggagaagtgggagcgtctgaccgtggcggatgcgctggagcccgtccagtttgaagatggagagaaaattgtggtccagggagagcctggggacgacttttacatcatcacggagggcaccgcgtccgtgctgcagcgccggtcccccaatgaggagtacgtggaggtggggcgcctgggaccctctgactacttcggggagattgcactgctgctgaaccggccccgggcggccactgtcgtggcccgggggcccctcaagtgtgtgaagctggaccggccccgcttcgagcgtgtgctggggccctgctctgagatcctcaagaggaacattcagcgttacaacagcttcatctccctcaccgtctgagcacagctcccgccctgcagccccagctccccagtgtggtggccgtgccctgctcgtctgtgtcgggggcccgggagccgctgtgtgaggtgtgggccgggtggggctgggtcccggcagcgtgaggactgccccttccccggactcactttttgnaataaatgatcaccttgtgcatttccaaatcaaaggacaagcggacaaaatgcatcccaagatcaaggaagggacaggncagcttcctccccacangcctccccggttgcctctgtgggcttctcctggggggcccacccccaccccctgnccagtctcctgganattgctttgagnatcggtccntccccaaaaaccaggcccaggaacgtttgccccttggggccttggntgaaccctngngaaggncaggtccccccaaaattgaanggncttgatngnggnnnaaagggtnntnaaaagggnnct

SEQ ID NO: 305 - DNA, 1240 bp, Homo Sapiens
  misc_feature (1)..(1): n is a, c, g, or t
  misc_feature (908)..(909): n is a, c, g, or t
  misc_feature (911)..(915): n is a, c, g, or t
  misc_feature (917)..(923): n is a, c, g, or t
  misc_feature (926)..(928): n is a, c, g, or t
  misc_feature (943)..(943): n is a, c, g, or t
  misc_feature (949)..(949): n is a, c, g, or t
  misc_feature (956)..(956): n is a, c, g, or t
  misc_feature (961)..(961): n is a, c, g, or t
  misc_feature (981)..(981): n is a, c, g, or t
  misc_feature (986)..(986): n is a, c, g, or t
  misc_feature (995)..(995): n is a, c, g, or t
  misc_feature (1017)..(1017): n is a, c, g, or t
  misc_feature (1037)..(1037): n is a, c, g, or t
  misc_feature (1039)..(1039): n is a, c, g, or t
  misc_feature (1050)..(1050): n is a, c, g, or t
  misc_feature (1053)..(1053): n is a, c, g, or t
  misc_feature (1064)..(1064): n is a, c, g, or t
  misc_feature (1066)..(1066): n is a, c, g, or t
  misc_feature (1069)..(1069): n is a, c, g, or t
  misc_feature (1074)..(1074): n is a, c, g, or t
  misc_feature (1098)..(1098): n is a, c, g, or t
  misc_feature (1102)..(1102): n is a, c, g, or t
  misc_feature (1108)..(1108): n is a, c, g, or t
  misc_feature (1114)..(1114): n is a, c, g, or t
  misc_feature (1122)..(1122): n is a, c, g, or t
  misc_feature (1136)..(1136): n is a, c, g, or t
  misc_feature (1138)..(1138): n is a, c, g, or t
  misc_feature (1143)..(1143): n is a, c, g, or t
  misc_feature (1145)..(1145): n is a, c, g, or t
  misc_feature (1154)..(1154): n is a, c, g, or t
  misc_feature (1159)..(1159): n is a, c, g, or t
  misc_feature (1165)..(1165): n is a, c, g, or t
  misc_feature (1172)..(1172): n is a, c, g, or t
  misc_feature (1176)..(1176): n is a, c, g, or t
  misc_feature (1178)..(1178): n is a, c, g, or t
  misc_feature (1182)..(1182): n is a, c, g, or t
  misc_feature (1200)..(1201): n is a, c, g, or t
  misc_feature (1208)..(1208): n is a, c, g, or t
  misc_feature (1212)..(1212): n is a, c, g, or t
  misc_feature (1217)..(1217): n is a, c, g, or t
  misc_feature (1221)..(1221): n is a, c, g, or t
  misc_feature (1229)..(1229): n is a, c, g, or t
  misc_feature (1233)..(1233): n is a, c, g, or t
  misc_feature (1238)..(1238): n is a, c, g, or t
naattagagaaaattactatgagaggatcgcatcaccatcaccatcacggatcctatttaggtgacactatagaatcgtcgacccacgcgtccgcggacgcgtgggcggacgcgtggggcagctcagaggaggtgtcctggatttcctggttctgtgggctccgtggcaatgaattcttctgtgaagtggatgaagactacatccaggacaaatttaatcttactggactcaatgagcaggtccctcactatcgacaagctctagacatgatcttggacctggagcctgatgaagaactggaagacaaccccaaccagagtgacctgattgagcaggcagccgagatgctttatggattgatccacgcccgctacatccttaccaaccgtggcatcgcccagatgttggaaaagtaccagcaaggagactttggttactgtcctcgtgtgtactgtgagaaccagccaatgcttcccattggcctttcagacatcccaggtgaagccatggtgaagctctactgccccaagtgcatggatgtgtacacacccaagtcatcaagacaccatcacacggatggcgcctacttcggcactggtttccctcacatgctcttcatggtgcatcccgagtaccggcccaagagacctgccaaccagtttgtgcccaggctctacggtttcaagatccatccgatggcctaccagctgcagctccaagccgccagcaacttcaagagcccagtcaagacgattcgctgattccctcccccacctgtcctgcagtctttgtcttttcctttcttttttgccaccctttcaggaaccctgtatggtttttagtttaaattaaaggagtcgttatcgtggtgggaatatgaaataaagtagaagaaaaggccaaaaannannnnnannnnnnnaannnggggcggccgctccntatagngagtcgnattangcttaattagctgaacttgnactcntgttgaaanatccagtaatgacctccaaacnccctctggatttgttcaaancnctcggttgccnccnggcgttttttntnggngaaantccagctagcttggggaattttcngganctaggnaagctnaaatgganaaaaaatccctggnantaccncngttgatttnccaanggcccntaaaaantttngnggcnttcagccgttgcccaggnncttaacnaacngtcantggnattaagcntttnaaacnta

SEQ ID NO: 306 - DNA, 1292 bp, Homo Sapiens
  misc_feature (1)..(1): n is a, c, g, or t
  misc_feature (815)..(815): n is a, c, g, or t
  misc_feature (882)..(882): n is a, c, g, or t
  misc_feature (938)..(938): n is a, c, g, or t
  misc_feature (962)..(962): n is a, c, g, or t
  misc_feature (964)..(964): n is a, c, g, or t
  misc_feature (978)..(978): n is a, c, g, or t
  misc_feature (988)..(988): n is a, c, g, or t
  misc_feature (1008)..(1008): n is a, c, g, or t
  misc_feature (1057)..(1058): n is a, c, g, or t
  misc_feature (1061)..(1061): n is a, c, g, or t
  misc_feature (1064)..(1064): n is a, c, g, or t
  misc_feature (1073)..(1073): n is a, c, g, or t
  misc_feature (1086)..(1086): n is a, c, g, or t
  misc_feature (1088)..(1088): n is a, c, g, or t
  misc_feature (1094)..(1094): n is a, c, g, or t
  misc_feature (1105)..(1105): n is a, c, g, or t
  misc_feature (1109)..(1109): n is a, c, g, or t
  misc_feature (1114)..(1114): n is a, c, g, or t
  misc_feature (1117)..(1117): n is a, c, g, or t
  misc_feature (1120)..(1120): n is a, c, g, or t
  misc_feature (1122)..(1122): n is a, c, g, or t
  misc_feature (1129)..(1129): n is a, c, g, or t
  misc_feature (1140)..(1140): n is a, c, g, or t
  misc_feature (1150)..(1150): n is a, c, g, or t
  misc_feature (1156)..(1156): n is a, c, g, or t
  misc_feature (1162)..(1162): n is a, c, g, or t
  misc_feature (1165)..(1165): n is a, c, g, or t
  misc_feature (1175)..(1175): n is a, c, g, or t
  misc_feature (1180)..(1180): n is a, c, g, or t
  misc_feature (1191)..(1191): n is a, c, g, or t
  misc_feature (1198)..(1198): n is a, c, g, or t
  misc_feature (1203)..(1203): n is a, c, g, or t
  misc_feature (1214)..(1214): n is a, c, g, or t
  misc_feature (1222)..(1222): n is a, c, g, or t
  misc_feature (1231)..(1231): n is a, c, g, or t
  misc_feature (1236)..(1237): n is a, c, g, or t
  misc_feature (1249)..(1249): n is a, c, g, or t
  misc_feature (1256)..(1256): n is a, c, g, or t
  misc_feature (1259)..(1259): n is a, c, g, or t
  misc_feature (1270)..(1270): n is a, c, g, or t
  misc_feature (1276)..(1276): n is a, c, g, or t
  misc_feature (1284)..(1285): n is a, c, g, or t
  misc_feature (1289)..(1289): n is a, c, g, or t
  misc_feature (1292)..(1292): n is a, c, g, or t
naatagagaaattactatgagaggatcgcatcaccatcaccatcacggatcctatttaggtgacactatagaatcgtcgacccacgcgtccggaagtacatccactcggccgggatcatccaccgggtaggtgcgaccgcagggtgagggtcgggtccagcagggctccgtcccagcctcctgtgctcacgctccgcgtgacctgcaggacctgaagcccagcaacgtggctgtgaacgaggactgtgagctcaggatcctggatttcgggctggcgcgccaggcggacgaggagatgaccggctatgtggccacgcgctggtaccgggcacctgagatcatgctcaactggatgcattacaaccaaacagtggatatctggtccgtgggctgcatcatggctgagctgctccagggcaaggccctcttcccgggaagcgactacattgaccagctgaagcgcatcatggaagtggtgggcacacccagccctgaggttctggcaaaaatctcctcggaacacgcccggacatatatccagtccctgccccccatgccccagaaggacctgagcagcatcttccgtggagccaaccccctggccatagacctccttggaaggatgctggtgctggacagtgaccagagggtcagtgcagctgaggcactggcccacgcctacttcagccagtaccacgaccccgaggatgagccagaggccgagccatatgatgagagcgttgaggccaaggagcgcacgctggaggagtggaaggagctcacttaccaggaagtcctcagcttcaagcccccanagccaccgaagccacctggcagcctggagattgagcagtgaggtgctgcccagcagccccctgaaancctgtggagggcttgggcctgcacccttccacagctggcctggtttcctcgagagncacctcccacactcctatggtcananactttctggcctangaacccctcnccttcaggaaaatctacacncatgttatgcatgcacaaacatgtgtgtacatgtgcttgccatgtgtannaantcngggcaaaantgtccctgggccnancttggncctcctgtccncttntgggnaanggncntttccantggaaactgantggggggtcnaaaaanccaaanggnttccctgggnaattnccctttttgtnccaggcnaaacnaaggaaggtcncctttggnttttttttntcccnnggttttttgaanaaccctnggnccggaacccgnaaaatnaaagaaanntccnggn

SEQ ID NO: 307 - DNA, 638 bp, Homo Sapiens
  misc_feature (31)..(32): n is a, c, g, or t
  misc_feature (35)..(35): n is a, c, g, or t
  misc_feature (40)..(40): n is a, c, g, or t
  misc_feature (60)..(60): n is a, c, g, or t
  misc_feature (70)..(70): n is a, c, g, or t
  misc_feature (615)..(615): n is a, c, g, or t
  misc_feature (621)..(621): n is a, c, g, or t
taaaaattatttgctttgtggcggatacatnntangattnattgtgagcggatacatttncacagaattnttaaagaggagaaattaactatgagaggatcgcatcaccatcaccatcacggatcctatttaggtgacactatagaatcgtcgacccacgcgtccgcggacgcgtgggtaaaaatttttatcaacctaccccgatctatggattttgaagaggcagaaagaagtgaaccaactcaagctctggaactgacagaggatgatattaaagaagatggcattgttccacttcgttatgttaagtttcagaatgttaacagtgtaactatatttgttcagtcgaatcaaggtgaagaggaaacaacaagaatttcatattttacttttattggtactccagtccaggcaacaaatatgaatgacttcaaacgagtagttggcaaaaaaggagaaagccactaaggtacaaaagacactggacaaccatattgcaatcagatctacagctcctggataattgcttgattctcgccagagactgtcaatgtttcattcattgccattaccaataaatcattgcttttgttcagatggtatcactagtggttncattgnaatcttgacacatgcaa

SEQ ID NO: 308 - DNA, 1156 bp, Homo Sapiens
  misc_feature (1)..(1): n is a, c, g, or t
  misc_feature (3)..(3): n is a, c, g, or t
  misc_feature (762)..(762): n is a, c, g, or t
  misc_feature (811)..(811): n is a, c, g, or t
  misc_feature (897)..(897): n is a, c, g, or t
  misc_feature (908)..(908): n is a, c, g, or t
  misc_feature (957)..(957): n is a, c, g, or t
  misc_feature (973)..(973): n is a, c, g, or t
  misc_feature (976)..(976): n is a, c, g, or t
  misc_feature (980)..(980): n is a, c, g, or t
  misc_feature (998)..(999): n is a, c, g, or t
  misc_feature (1002)..(1002): n is a, c, g, or t
  misc_feature (1007)..(1007): n is a, c, g, or t
  misc_feature (1013)..(1013): n is a, c, g, or t
  misc_feature (1017)..(1017): n is a, c, g, or t
  misc_feature (1031)..(1031): n is a, c, g, or t
  misc_feature (1036)..(1036): n is a, c, g, or t
  misc_feature (1044)..(1045): n is a, c, g, or t
  misc_feature (1052)..(1053): n is a, c, g, or t
  misc_feature (1059)..(1059): n is a, c, g, or t
  misc_feature (1067)..(1067): n is a, c, g, or t
  misc_feature (1070)..(1070): n is a, c, g, or t
  misc_feature (1072)..(1072): n is a, c, g, or t
  misc_feature (1075)..(1075): n is a, c, g, or t
  misc_feature (1085)..(1085): n is a, c, g, or t
  misc_feature (1093)..(1093): n is a, c, g, or t
  misc_feature (1111)..(1111): n is a, c, g, or t
  misc_feature (1122)..(1123): n is a, c, g, or t
  misc_feature (1134)..(1134): n is a, c, g, or t
  misc_feature (1140)..(1140): n is a, c, g, or t
  misc_feature (1148)..(1148): n is a, c, g, or t
  misc_feature (1150)..(1150): n is a, c, g, or t
ntntagagaaattactatgagaggatcgcatcaccatcaccatcacggatcctatttaggtgacactatagaatcgtcgacccacgcgtccgcctgcctactgcagcgtaggcctcgcctcaacggcaggagagcaggcggctgcggttgctgcagccttcagtctccacccggactacgccatgttggggtttgtgggtcgggtggccgctgctccggcctccggggccttgcggagactcaccccttcagcgtcgctgcccccagctcagctcttactgcgggccgctccgacggcggtccatcctgtcagggactatgcggcgcaaacatctccttcgccaaaagcaggcgccgccaccgggcgcatcgtggcggtcattggcgcagtggtggacgtccagtttgatgagggactaccaccaattctaaatgccctggaagtgcaaggcagggagaccagactggttttggaggtggcccagcatttgggtgagagcacagtaaggactattgctatggatggtacagaaggcttggttagaggccagaaagtactggattctggtgcaccaatcaaaattcctgttggtcctgagactttgggcagaatcatgaatgtcattggagaacctattgatgaaagaggtcccatcaaaaccaaacaatttgctcccattcatgctgaggctccaaagttcatggaaatgagtgttgagcaggaaattctggtgactggtatcaaggttgtcgatctgctanctccctatgccaagggtggcaaaattggtcttttttggtggtgctgganttggcaagactgtactgatcatggagttaatcaacaatgtcgcccaaagcccatggtggttactctgtgtttgctggtggttggtnaaaaggacccntgaaaggcaatgaattaataccatgaaaatgatttgaatctggtgttanccaacttaaaagaatnccncctnctaaagtaaccgcttggnntantggtncaaatnaatnaacccaccctggtnccccntgccccgnntaacctnncaactnggcctgantgngnctnaataccttcnaaaaaacnaagaaagtcaaaaaaggnactgccatttnnttgaaaaaatnctttcncttccccncnatgggt

1-19. (canceled)

20. A method for diagnosing multiple sclerosis, comprising
a) contacting at least one marker sequence of a cDNA selected from the group consisting of SEQ 1-308 and SEQ 1a-308a, or a respective protein encoded thereby, or a respective partial sequence or fragment thereof, fixed on a solid support, with body fluid or tissue extract of a patient, and
b) detecting an interaction of the body fluid or tissue extract with the marker sequences from a).

21. The method of claim 20, wherein said at least one marker sequence is at least one protein encoded by a cDNA selected from the group consisting of SEQ 1-308 and SEQ 1a-308a, and said method further comprising normalizing said least one marker with autoantibodies from patients who do not have multiple sclerosis.

22. The method of claim 20, wherein said body fluid is obtained from cerebrospinal fluid of said patient.

22. A method for risk stratification, or for managing the treatment of a patient with multiple sclerosis, comprising determining at least one marker sequence of a cDNA selected from the group SEQ 1-308 and/or SEQ 1a-308, or a respective protein coding therefor, or a respective partial sequence or fragment thereof, from a patient.

23. The method of claim 7, wherein the stratification or the treatment management comprises decisions regarding the treatment and therapy of the patient, hospitalization of the patient, use, effect or dosage of one or more pharmaceuticals, a therapeutic measure, or monitoring the progression of an illness or treatment, etiology, or classification of a disease.

24. An arrangement of marker sequences comprising at least one marker sequence of a cDNA selected from the group consisting of SEQ 1-308 and SEQ 1a-308a, or a respective protein encoded thereby.

25. The arrangement of claim 24, wherein said arrangement comprises at least 2 to 5 or 10 marker sequences.

26. The arrangement of claim 24,wherein the marker sequences are present in the form of clones.

27. An assay, protein biochip comprising an arrangement according to claim 24, characterized in that the marker sequences are applied to a solid support.

28. A method for identifying and characterizing a substance for multiple sclerosis, comprising contacting an arrangement of claim 24 with at least one substance to be analyzed, and detecting binding of said at least one substance to a marker sequence of said arrangement.

29. A method for screening active ingredients for multiple sclerosis comprising contacting an arrangement of claim 24 with at least one substance to be analyzed, and detecting binding of said at least one substance to a marker sequence of said arrangement

30. A method for apheresis or dialysis for patients for multiple sclerosis comprising using an arrangement of claim 24 for carrying out apheresis or dialysis for patients with multiple sclerosis.
